(19) United States
(12) Patent Application Publication
(10) Pub. No.: US 2019/0391152 A1
(43) Pub. Date: Dec. 26, 2019

(54) MARKERS SELECTIVELY DEREGULATED IN TUMOR-INFILTRATING REGULATORY T CELLS

(71) Applicant: CheckMab S.R.L., Milano (IT)

(72) Inventors: Sergio Abrignani, Rapolano Terme (IT); Massimiliano Pagani, Trescore Balneario (IT)

(73) Assignee: CheckMab S.R.L., Milano (IT)

(21) Appl. No.: 16/301,805

(22) PCT Filed: May 15, 2017
(86) PCT No.: PCT/EP2017/061642

§ 371 Date: Nov. 15, 2018

(30) Foreign Application Priority Data
May 16, 2016 (EP) 16169791.7
Nov. 14, 2016 (EP) 16198724.3

(51) Int. Cl. G01N 33/574; A61K 45/06; C07K 16/28; C07K 16/30; C07K 14/47; C12N 15/113

(52) U.S. Cl. CPC G01N 33/57492; A61K 45/06; C07K 16/2866; C07K 16/30; C07K 14/4748; C12N 2310/14; C12N 15/1138; C07K 2317/732; C07K 2317/76; C12N 2310/11; C12N 15/1135

(57) ABSTRACT

The present invention discloses a number of markers selectively deregulated in tumor-infiltrating regulatory T cells. The invention relates to molecules able to modulate the expression and/or function of at least one such marker for use in the prevention and/or treatment of the tumor. Preferably the molecule specifically binds to the marker and induces antibody-dependent cell-mediated cytotoxicity (ADCC). The invention further relates to a molecule able to modulate the expression and/or function of at least one such marker for use in a method for in vivo depleting tumor-infiltrating regulatory T cell in a subject, or for use in a method to enhance tumor immunity in a subject. Corresponding pharmaceutical compositions are also contemplated.

### RELATED APPLICATION

[0001] This application is a national stage filing under 35 U.S.C. § 371 of International Application Serial No. PCT/EP2017/061642, filed May 15, 2017, the contents of which is incorporated herein by reference in its entirety.

### FIELD OF THE INVENTION

[0002] The present invention relates to a molecule able to modulate the expression and/or function of at least one marker that is selectively deregulated in tumor-infiltrating regulatory T cell or to a molecule capable of specifically binding to at least one marker that is selectively deregulated in tumor-infiltrating regulatory T cell and inducing antibody-dependent cell-mediated cytotoxicity (ADCC) for use in the prevention and/or treatment of cancer or for use in a method for in vivo depleting tumor-infiltrating regulatory T cell in a subject or for use in a method to enhance tumor immunity in a subject and relative pharmaceutical composition.

### BACKGROUND OF THE INVENTION

[0003] The combination of genetic mutations and epigenetic modifications that are peculiar to all tumors generate antigens that T and B lymphocytes can use to specifically recognize tumor cells (Jamal-Hanjani et al., 2013). It is increasingly clear that T lymphocytes recognizing tumor derived peptides presented by major histocompatibility complex (MHC) molecules play a central role in immunotherapy and in conventional chemo-radiotherapy of cancer (Galluzzi et al., 2015). In fact, anti-tumor T cell responses arise in cancer patients but are disabled upon tumor progression by suppressive mechanisms triggered by the interplay between malignant cells and the tumor microenvironment (Munn and Bronte, 2015). The tumor-dependent immunosuppressive mechanisms depend on the integrated action of infiltrating leukocytes and lymphocytes that upregulate a range of modulatory molecules, collectively called immune checkpoints, whose function is only partially characterized (Pardoll, 2012). Therefore, the search for agonists of co-stimulatory complexes or antagonists of inhibitory molecules to potentiate antigen-specific T cell responses is a primary goal of current anti-tumor research (Sharma and Allison, 2015; Zitvogel et al., 2013). Indeed, clinical trials have unequivocally shown that the blockade of immune checkpoints unleashes the spontaneous anti-tumor immune responses in such a powerful way that it has created a paradigm shift in cancer therapy (Sledzinska et al., 2015; Topalian et al., 2015).

[0004] Amongst the immune checkpoints targeted by blocking strategies, CTLA-4 has been one of the first to be translated into therapeutic applications.

[0005] Anti-CTLA-4 monoclonal antibodies (mAb) showed remarkable success in metastatic melanoma, and more recently in non-small-cell lung cancer, prostate cancer, renal cell carcinoma, urothelial carcinoma and ovarian cancer (Carthon et al., 2010; Hodi et al., 2010; van den Eertwegh et al., 2012; Yang et al., 2007). However, the fraction of patients that do not respond remains high, prompting a deeper investigation of the mechanisms underpinning the modulation of immune responses by tumors. Recent experimental evidence showed that anti-CTLA-4 mAb efficacy depends on FcγR mediated depletion of CD4⁺ regulatory T cells (Treg cells) within the tumor microenvironment (Peggs et al., 2009; Selby et al., 2013; Simpson et al., 2013; Twyman-Saint Victor et al., 2015). Treg cells, which are physiologically engaged in the maintenance of immunological self-tolerance and immune homeostasis (Josefowicz et al., 2012; Sakaguchi et al., 2008), are potent suppressors of effector cells and are found at high frequencies in various types of cancers (Fridman et al., 2012; Nishikawa and Sakaguchi, 2010). Interestingly, Treg cells adapt their transcriptional program to the various cytokines to which they are exposed in the inflammatory milieu (Campbell and Koch, 2011). This versatility is controlled by transcription factors generally associated with the differentiation of other effector CD4⁺ T cell subsets, resulting in various Treg cell populations with unique features and immunomodulatory functions (Duhen et al., 2012; Geginat et al., 2014). Moreover, Treg cells infiltrating non-lymphoid tissues are reported to exhibit unique phenotypes and transcriptional signatures, as they can display functions beyond their well-established suppressive roles, such as metabolic modulation in adipose tissue (Cipolletta et al., 2012) or regulation of tissue repair in skeletal muscle (Burzyn et al., 2013) and in lung tissue (Arpaia et al., 2015).

[0006] Treg cells depletion has been reported to increase anti-tumor specific immune responses and to reduce tumor burden (Marabelle et al., 2013; Teng et al., 2010; Walter et al., 2012). Although promising clinical results have been achieved with Treg cell depleting strategies, some relevant issues are to be addressed, for a safer, more effective and wider clinical application of these therapies. First, severe autoimmunity can occur following systemic Treg cells depletion (Nishikawa and Sakaguchi, 2010), which could be avoided if selective depletion of tumor infiltrating Treg cells were feasible. A second issue concerns the specificity of targeting, indeed Treg cells share with effector lymphocytes most of the molecules targeted for therapy, which can possibly deplete also the tumor-specific effector cells. Therefore, the molecular characterization of Treg cells at different tumor sites should help to better define therapeutic targets through a better description of their signature molecules and of the network that regulates Treg cell functions in the tumor microenvironment.

[0007] Non-small-cell lung cancer (NSCLC) and colorectal cancer (CRC) are the two most frequent cancers in both genders (Torre et al., 2015). NSCLC has the worst prognosis due to its high mortality rate even in early stages. Although CRC survival rate is highly dependent on the tumor stage at diagnosis, about 50% of patients will progress to metastatic cancer (Gonzalez-Pons and Cruz-Correa, 2015). Both tumors have been targeted with therapies based on monoclonal antibodies to checkpoint inhibitors, but the outcomes were different. While remarkable clinical success has been obtained in NSCLC, evidence of durable response in CRC is scarce with the exception of mismatch repair-deficient CRC lesions (Jacobs et al., 2015; Kroemer et al., 2015; Le et al., 2015).

[0008] Then there is still need for agents that target tumor infiltrating Treg cells for the treatment and/or prevention of cancer.

### SUMMARY OF THE INVENTION

[0009] Tumor-infiltrating regulatory T lymphocytes (Treg) can suppress effector T cells specific for tumor antigens. Since new anti-cancer immunotherapies aim at unleashing effector T cells by targeting immune-checkpoints, deeper molecular definitions of tumor-infiltrating-lymphocytes could offer new therapeutic opportunities. Transcriptomes of T helper 1 (Th1), Th17 and Treg cells infiltrating colorectal or non-small-cell lung cancers were compared to transcriptomes of the same subsets from normal tissues, and validated at the single cell level. The inventors found tumor-infiltrating Treg cells are highly suppressive, upregulate several immune-checkpoints, and express on the cell surface specific signature molecules such as interleukin-1 receptor 2 (IL1R2), programmed death (PD)-1 Ligand1, PD-1 Ligand2, and CCR8 chemokine which were not previously described on Treg cells. Remarkably, high expression in whole tumor samples of Treg signature genes, such as LAYN, MAGEH1 or CCR8, correlated with poor prognosis. The invention provides new insights into the molecular identity and functions of human tumor-infiltrating Treg cells, and define new potential targets for tumor immunotherapy.

[0010] In the present invention, the inventors provide a comprehensive transcriptome analysis of human CD4⁺ Treg cells and effector cells (Th1 and Th17) infiltrating NSCLC or CRC and their matched normal tissues.

[0011] Inventors defined molecular signatures of tumor-infiltrating Treg cells in these two cancer types and confirmed the relevance of these signatures by single-cell analyses. These data could help a better understanding of Treg functional role at tumor sites and pave the way to the identification of therapeutic targets for more specific and safer modulation of Treg cells in cancer therapy.

[0012] The inventors' findings provide new insights on the inhibitory mechanisms of Treg cells and offer precise targets for cancer immunotherapy.

[0013] Then the present invention provides a molecule able to modulate the expression and/or function of at least one marker that is selectively deregulated in tumor-infiltrating regulatory T cells for use in the prevention and/or treatment of said tumor.

[0014] Preferably, the molecule according to the invention is capable of specifically binding to said at least one marker and inducing antibody-dependent cell-mediated cytotoxicity (ADCC).

[0015] Said molecule is preferably able to selectively deplete tumor-infiltrating regulatory T cells. Said molecule is preferably selected from the group consisting of:

[0016] a) an antibody or a fragment thereof;

[0017] b) a polypeptide;

[0018] c) a small molecule;

[0019] d) a polynucleotide coding for said antibody or polypeptide or a functional derivative thereof;

[0020] e) a polynucleotide, such as antisense construct, antisense oligonucleotide, RNA interference construct or siRNA,

[0021] e) a vector comprising or expressing the polynucleotide as defined in d) or e);

[0022] f) a host cell genetically engineered expressing said polypeptide or antibody or comprising the polynucleotide as defined in d) or e).

[0023] Preferably, the marker is selected from the group consisting of at least one marker disclosed in the following Table VIII.

TABLE VIII

| MARKER NAME | ENSEMBL_release87 | ENTREZ_IDrelease108 | MARKER NAME | ENSEMBL_release87 | ENTREZ_IDrelease108 |
|---|---|---|---|---|---|
| FUCA2 | ENSG00000001036 | 2519 | HADHB | ENSG00000138029 | 3032 |
| ICA1 | ENSG00000003147 | 3382 | CEP55 | ENSG00000138180 | 55165 |
| TTC22 | ENSG00000006555 | 55001 | ENTPD1 | ENSG00000138185 | 953 |
| COX10 | ENSG00000006695 | 1352 | NAB1 | ENSG00000138386 | 4664 |
| IL32 | ENSG00000008517 | 9235 | HECW2 | ENSG00000138411 | 57520 |
| ETV7 | ENSG00000010030 | 51513 | CD27 | ENSG00000139193 | 939 |
| ATP2C1 | ENSG00000017260 | 27032 | CDH24 | ENSG00000139880 | 64403 |
| FAS | ENSG00000026103 | 355 | RAB15 | ENSG00000139998 | 376267 |
| ARNTL2 | ENSG00000029153 | 56938 | ETFA | ENSG00000140374 | 2108 |
| IKZF2 | ENSG00000030419 | 22807 | KSR1 | ENSG00000141068 | 8844 |
| PEX3 | ENSG00000034693 | 8504 | PCTP | ENSG00000141179 | 58488 |
| MAT2B | ENSG00000038274 | 27430 | SECTM1 | ENSG00000141574 | 6398 |
| TSPAN17 | ENSG00000048140 | 26262 | EVA1B | ENSG00000142694 | 55194 |
| COL9A2 | ENSG00000049089 | 1298 | WDTC1 | ENSG00000142784 | 23038 |
| TNFRSF9 | ENSG00000049249 | 3604 | CTTNBP2NL | ENSG00000143079 | 55917 |
| FOXP3 | ENSG00000049768 | 50943 | CASQ1 | ENSG00000143318 | 844 |
| NFE2L3 | ENSG00000050344 | 9603 | SNAP47 | ENSG00000143740 | 116841 |
| LIMA1 | ENSG00000050405 | 51474 | STAC | ENSG00000144681 | 6769 |
| TNIP3 | ENSG00000050730 | 79931 | ARL6IP5 | ENSG00000144746 | 10550 |
| LY75 | ENSG00000054219 | 4065 | ADPRH | ENSG00000144843 | 141 |
| ZNF280C | ENSG00000056277 | 55609 | PAM | ENSG00000145730 | 5066 |
| YIPF1 | ENSG00000058799 | 54432 | RNF145 | ENSG00000145860 | 153830 |
| NFYC | ENSG00000066136 | 4802 | TTBK1 | ENSG00000146216 | 84630 |
| ISOC1 | ENSG00000066583 | 51015 | TMEM140 | ENSG00000146859 | 55281 |
| PHKA1 | ENSG00000067177 | 5255 | CHST7 | ENSG00000147119 | 56548 |
| ACSL4 | ENSG00000068366 | 2182 | CHRNA6 | ENSG00000147434 | 8973 |
| MAST4 | ENSG00000069020 | 375449 | MKI67 | ENSG00000148773 | 4288 |
| LMCD1 | ENSG00000071282 | 29995 | PTPRJ | ENSG00000149177 | 5795 |
| TFRC | ENSG00000072274 | 7037 | ZC3H12C | ENSG00000149289 | 85463 |
| PANX2 | ENSG00000073150 | 56666 | NCAM1 | ENSG00000149294 | 4684 |
| FNDC3B | ENSG00000075420 | 64778 | INPP1 | ENSG00000151689 | 3628 |
| REXO2 | ENSG00000076043 | 25996 | JAKMIP1 | ENSG00000152969 | 152789 |
| TP73 | ENSG00000078900 | 7161 | GTF3C6 | ENSG00000155115 | 112495 |
| LXN | ENSG00000079257 | 56925 | RHOC | ENSG00000155366 | 389 |
| CEACAM1 | ENSG00000079385 | 634 | SLC16A1 | ENSG00000155380 | 6566 |
| IL12RB2 | ENSG00000081985 | 3595 | BATF | ENSG00000156127 | 10538 |
| GSK3B | ENSG00000082701 | 2932 | CXCL13 | ENSG00000156234 | 10563 |
| TDRD3 | ENSG00000083544 | 81550 | SH3RF2 | ENSG00000156463 | 153769 |
| RRAGB | ENSG00000083750 | 10325 | NPTN | ENSG00000156642 | 27020 |
| STARD7 | ENSG00000084090 | 56910 | CCNB2 | ENSG00000157456 | 9133 |
| SSH1 | ENSG00000084112 | 54434 | RNF207 | ENSG00000158286 | 388591 |
| NCOA1 | ENSG00000084676 | 8648 | AHCYL2 | ENSG00000158467 | 23382 |
| MGST2 | ENSG00000085871 | 4258 | PTGIR | ENSG00000160013 | 5739 |
| ACOX3 | ENSG00000087008 | 8310 | CALM3 | ENSG00000160014 | 808 |
| AURKA | ENSG00000087586 | 6790 | TMPRSS3 | ENSG00000160183 | 64699 |
| TPX2 | ENSG00000088325 | 22974 | FCRL3 | ENSG00000160856 | 115352 |
| ANKRD10 | ENSG00000088448 | 55608 | PAQR4 | ENSG00000162073 | 124222 |
| FKBP1A | ENSG00000088832 | 2280 | ZG16B | ENSG00000162078 | 124220 |
| SIRPG | ENSG00000089012 | 55423 | JAK1 | ENSG00000162434 | 3716 |
| BIRC5 | ENSG00000089685 | 332 | DIRAS3 | ENSG00000162595 | 9077 |
| RGS1 | ENSG00000090104 | 5996 | ACTG2 | ENSG00000163017 | 72 |
| DPYSL2 | ENSG00000092964 | 1808 | SGPP2 | ENSG00000163082 | 130367 |
| WHRN | ENSG00000095397 | 25861 | NEURL3 | ENSG00000163121 | 93082 |
| CENPM | ENSG00000100162 | 79019 | CTLA4 | ENSG00000163599 | 1493 |
| SEPT3 | ENSG00000100167 | 55964 | ICOS | ENSG00000163600 | 29851 |
| NCF4 | ENSG00000100365 | 4689 | RYBP | ENSG00000163602 | 23429 |
| CSF2RB | ENSG00000100368 | 1439 | KIF15 | ENSG00000163808 | 56992 |
| IL2RB | ENSG00000100385 | 3560 | TMEM184C | ENSG00000164168 | 55751 |
| CNIH1 | ENSG00000100528 | 10175 | C5orf63 | ENSG00000164241 | 401207 |
| ZMYND8 | ENSG00000101040 | 23613 | PTTG1 | ENSG00000164611 | 9232 |
| MAP1LC3A | ENSG00000101460 | 84557 | MELK | ENSG00000165304 | 9833 |
| PIGU | ENSG00000101464 | 128869 | FAAH2 | ENSG00000165591 | 158584 |
| NXT2 | ENSG00000101888 | 55916 | PRDX3 | ENSG00000165672 | 10935 |
| SMS | ENSG00000102172 | 6611 | HPRT1 | ENSG00000165704 | 3251 |
| NDFIP2 | ENSG00000102471 | 54602 | CACNB2 | ENSG00000165995 | 783 |
| ACP5 | ENSG00000102575 | 54 | TPP1 | ENSG00000166340 | 1200 |
| NFAT5 | ENSG00000102908 | 10725 | AKIP1 | ENSG00000166452 | 56672 |
| CYB5B | ENSG00000103018 | 80777 | ACAA2 | ENSG00000167315 | 10449 |
| IL21R | ENSG00000103522 | 50615 | GNG8 | ENSG00000167414 | 94235 |
| LAPTM4B | ENSG00000104341 | 55353 | GNG4 | ENSG00000168243 | 2786 |
| IL7 | ENSG00000104432 | 3574 | CX3CR1 | ENSG00000168329 | 1524 |
| NCALD | ENSG00000104490 | 83988 | AHCYL1 | ENSG00000168710 | 10768 |
| ERI1 | ENSG00000104626 | 90459 | TSPAN5 | ENSG00000168785 | 10098 |
| EBI3 | ENSG00000105246 | 10148 | PGM2 | ENSG00000169299 | 55276 |
| PLA2G4C | ENSG00000105499 | 8605 | CRADD | ENSG00000169372 | 8738 |
| CDK6 | ENSG00000105810 | 1021 | UGP2 | ENSG00000169764 | 7360 |
| HOXA1 | ENSG00000105991 | 3198 | ZNF282 | ENSG00000170265 | 8427 |
| GLCCI1 | ENSG00000106415 | 113263 | GLB1 | ENSG00000170266 | 2720 |
| MINPP1 | ENSG00000107789 | 9562 | SMAD1 | ENSG00000170365 | 4086 |
| ACTA2 | ENSG00000107796 | 59 | SPATA24 | ENSG00000170469 | 202051 |
| WSB1 | ENSG00000109046 | 26118 | PRKCDBP | ENSG00000170955 | 112464 |
| CLNK | ENSG00000109684 | 116449 | TADA3 | ENSG00000171148 | 10474 |
| HTATIP2 | ENSG00000109854 | 10553 | RBKS | ENSG00000171174 | 64080 |
| CTSC | ENSG00000109861 | 1075 | NETO2 | ENSG00000171208 | 81831 |
| VWA5A | ENSG00000110002 | 4013 | LRG1 | ENSG00000171236 | 116844 |
| DCPS | ENSG00000110063 | 28960 | FAM98B | ENSG00000171262 | 283742 |
| SLC35F2 | ENSG00000110660 | 54733 | CHST11 | ENSG00000171310 | 50515 |
| FOXM1 | ENSG00000111206 | 2305 | ECEL1 | ENSG00000171551 | 9427 |
| RAD51AP1 | ENSG00000111247 | 10635 | BCL2L1 | ENSG00000171552 | 598 |
| RASAL1 | ENSG00000111344 | 8437 | MALT1 | ENSG00000172175 | 10892 |
| VDR | ENSG00000111424 | 7421 | ZMAT3 | ENSG00000172667 | 64393 |
| FAM184A | ENSG00000111879 | 79632 | CORO1B | ENSG00000172725 | 57175 |
| DNPH1 | ENSG00000112667 | 10591 | CYP7B1 | ENSG00000172817 | 9420 |
| KIF20A | ENSG00000112984 | 10112 | HPSE | ENSG00000173083 | 10855 |
| SEC24A | ENSG00000113615 | 10802 | VANGL1 | ENSG00000173218 | 81839 |
| KAT2B | ENSG00000114166 | 8850 | GLRX | ENSG00000173221 | 2745 |
| PPM1G | ENSG00000115241 | 5496 | TRIB1 | ENSG00000173334 | 10221 |
| IL1R2 | ENSG00000115590 | 7850 | CD7 | ENSG00000173762 | 924 |
| IL1R1 | ENSG00000115594 | 3554 | HAP1 | ENSG00000173805 | 9001 |
| IL1RL2 | ENSG00000115598 | 8808 | FBXO45 | ENSG00000174013 | 200933 |
| IL1RL1 | ENSG00000115602 | 9173 | CHST2 | ENSG00000175040 | 9435 |
| UXS1 | ENSG00000115652 | 80146 | RMI2 | ENSG00000175643 | 116028 |
| SLC25A12 | ENSG00000115840 | 8604 | SLC35E3 | ENSG00000175782 | 55508 |
| THADA | ENSG00000115970 | 63892 | ZBTB38 | ENSG00000177311 | 253461 |
| PARK7 | ENSG00000116288 | 11315 | ZBED2 | ENSG00000177494 | 79413 |
| LEPR | ENSG00000116678 | 3953 | PARD6G | ENSG00000178184 | 84552 |
| GADD45A | ENSG00000116717 | 1647 | GLDC | ENSG00000178445 | 2731 |
| KIF14 | ENSG00000118193 | 9928 | AKAP5 | ENSG00000179841 | 9495 |
| MREG | ENSG00000118242 | 55686 | CCR8 | ENSG00000179934 | 1237 |
| HSDL2 | ENSG00000119471 | 84263 | PAK2 | ENSG00000180370 | 5062 |
| FLVCR2 | ENSG00000119686 | 55640 | YIPF6 | ENSG00000181704 | 286451 |
| CD274 | ENSG00000120217 | 29126 | TIGIT | ENSG00000181847 | 201633 |
| SOCS2 | ENSG00000120833 | 8835 | CREB3L2 | ENSG00000182158 | 64764 |
| TNFRSF8 | ENSG00000120949 | 943 | XKRX | ENSG00000182489 | 402415 |
| RDH10 | ENSG00000121039 | 157506 | CADM1 | ENSG00000182985 | 23705 |
| LAX1 | ENSG00000122188 | 54900 | LHFP | ENSG00000183722 | 10186 |
| TWIST1 | ENSG00000122691 | 7291 | CSF1 | ENSG00000184371 | 1435 |
| ZWINT | ENSG00000122952 | 11130 | PTP4A3 | ENSG00000184489 | 11156 |
| CIT | ENSG00000122966 | 11113 | CDCA2 | ENSG00000184661 | 157313 |
| ACOT9 | ENSG00000123130 | 23597 | OSBP2 | ENSG00000184792 | 23762 |
| IKZF4 | ENSG00000123411 | 64375 | METTL7A | ENSG00000185432 | 25840 |
| HJURP | ENSG00000123485 | 55355 | SPATC1 | ENSG00000186583 | 375686 |
| METTL8 | ENSG00000123600 | 79828 | TNFRSF4 | ENSG00000186827 | 7293 |
| TOX2 | ENSG00000124191 | 84969 | TNFRSF18 | ENSG00000186891 | 8784 |
| GTSF1L | ENSG00000124196 | 149699 | TMPRSS6 | ENSG00000187045 | 164656 |
| SOX4 | ENSG00000124766 | 6659 | GCNT1 | ENSG00000187210 | 2650 |
| TM9SF2 | ENSG00000125304 | 9375 | MAGEH1 | ENSG00000187601 | 28986 |
| HS3ST3B1 | ENSG00000125430 | 9953 | NHS | ENSG00000188158 | 4810 |
| EML2 | ENSG00000125746 | 24139 | IL17REL | ENSG00000188263 | 400935 |
| MGME1 | ENSG00000125871 | 92667 | ADAT2 | ENSG00000189007 | 134637 |
| IGFLR1 | ENSG00000126246 | 79713 | NEMP2 | ENSG00000189362 | 100131211 |
| DLGAP5 | ENSG00000126787 | 9787 | SPATS2L | ENSG00000196141 | 26010 |
| HIVEP3 | ENSG00000127124 | 59269 | NTNG2 | ENSG00000196358 | 84628 |
| LRRC61 | ENSG00000127399 | 65999 | MYL6B | ENSG00000196465 | 140465 |
| TST | ENSG00000128311 | 7263 | ARHGEF12 | ENSG00000196914 | 23365 |
| STRIP2 | ENSG00000128578 | 57464 | MAP3K5 | ENSG00000197442 | 4217 |
| MYO5C | ENSG00000128833 | 55930 | PDGFA | ENSG00000197461 | 5154 |
| FOXA1 | ENSG00000129514 | 3169 | PDCD1LG2 | ENSG00000197646 | 80380 |
| ITFG1 | ENSG00000129636 | 81533 | TOR4A | ENSG00000198113 | 54863 |
| KLHDC7B | ENSG00000130487 | 113730 | HIBCH | ENSG00000198130 | 26275 |
| TRAF3 | ENSG00000131323 | 7187 | ZNF334 | ENSG00000198185 | 55713 |
| MCCC2 | ENSG00000131844 | 64087 | NTRK1 | ENSG00000198400 | 4914 |
| GRSF1 | ENSG00000132463 | 2926 | TMA16 | ENSG00000198498 | 55319 |
| SYT11 | ENSG00000132718 | 23208 | WDHD1 | ENSG00000198554 | 11169 |
| SLC41A1 | ENSG00000133065 | 254428 | FAM19A2 | ENSG00000198673 | 338811 |
| ATP13A3 | ENSG00000133657 | 79572 | F5 | ENSG00000198734 | 2153 |
| MICAL2 | ENSG00000133816 | 9645 | GK | ENSG00000198814 | 2710 |
| IL2RA | ENSG00000134460 | 3559 | INPP5F | ENSG00000198825 | 22876 |
| CABLES1 | ENSG00000134508 | 91768 | LAYN | ENSG00000204381 | 143903 |
| RFK | ENSG00000135002 | 55312 | CARD16 | ENSG00000204397 | 114769 |
| HAVCR2 | ENSG00000135077 | 84868 | TBC1D8 | ENSG00000204634 | 11138 |
| CGA | ENSG00000135346 | 1081 | CD177 | ENSG00000204936 | 57126 |
| FAIM2 | ENSG00000135472 | 23017 | LEPROT | ENSG00000213625 | 54741 |
| EGLN1 | ENSG00000135766 | 54583 | SEC14L6 | ENSG00000214491 | 730005 |
| ARHGEF4 | ENSG00000136002 | 50649 | TRIM16 | ENSG00000221926 | 10626 |
| SLC41A2 | ENSG00000136052 | 84102 | LTA | ENSG00000226979 | 4049 |
| FLNB | ENSG00000136068 | 2317 | PROB1 | ENSG00000228672 | 389333 |
| RCBTB1 | ENSG00000136144 | 55213 | AF165138.7 | ENSG00000243440 | NA |
| TMOD1 | ENSG00000136842 | 7111 | USP51 | ENSG00000247746 | 158880 |
| TPMT | ENSG00000137364 | 7172 | CARD17 | ENSG00000255221 | 440068 |
| CASP1 | ENSG00000137752 | 834 | DOC2B | ENSG00000272636 | 8447 |
| NUSAP1 | ENSG00000137804 | 51203 | C17orf96 | ENSG00000273604 | 100170841 |
| ADAM10 | ENSG00000137845 | 102 | SSTR3 | ENSG00000278195 | 6753 |
| ZNF280D | ENSG00000137871 | 54816 | AC019206.1 | ENSG00000279229 | NA |

[0024] wherein each of said marker name is characterized by “Ensembl gene id” and includes all of therein disclosed isoform protein sequences.

[0025] Each gene of table VIII is characterized by its Ensembl Gene accession number (ENSG), retrievable in the public database EnsEMBL (http://www.ensembl.org) and by its Entrez Gene ID, retrievable in the public database NCBI (https://www.ncbi.nlm.nih.gov/), if present.

[0026] Preferably the marker is selected from the group consisting of: a transmembrane protein, a cytokine, an epigenetic factor, a kinase phosphatase or a transcription factor.

[0027] More preferably, the marker is a transmembrane protein selected from the group of SEQ ID NO:1-661, even more preferably, the marker is selected from the group consisting of: LAYN (SEQ ID NOs:1-9), CCR8 (SEQ ID Nos:10-11), IL21R (SEQ ID Nos: 12-14), IL1R2 (SEQ ID Nos:206-209), LY75 (SEQ ID NO: 78), SIRPG (SEQ ID Nos:122-126), CD177 (SEQ ID Nos:651-653), CD7 (SEQ ID Nos:549-554), FCRL3 (SEQ ID Nos:452-457), CADM1 (SEQ ID Nos: 570-583), NTNG2 (SEQ ID Nos:621-622), CSF2RB (SEQ ID Nos:134-137), SECTM1 (SEQ ID Nos: 349-356), TSPAN5 (SEQ ID Nos:497-503), TMPRSS3 (SEQ ID Nos:448-451), TMPRSS6 (SEQ ID Nos:605-611), METTL7A (SEQ ID Nos:600-604), THADA (SEQ ID Nos: 237), NDFIP2 (SEQ ID Nos:148-151), CHRNA6 (SEQ ID Nos:392-394), or from the group consisting of:

LAYN (SEQ ID NOs: 1-9
[>ENSG00000204381_ENST00000375614_
ENSP00000364764_LAYN
(SEQ ID NO: 1)
MRPGTALQAVLLAVLLVGLRAATGRLLSGQPVCRGGTQRPCYKVIYFH
DTSRRLNFEEAKEACRRDGGQLVSIESEDEQKLIEKFIENLLPSDGDF
WIGLRRREEKQSNSTACQDLYAWTDGSISQFRNWYVDEPSCGSEVCVV
MYHQPSAPAGIGGPYMFQWNDDRCNMKNNFICKYSDEKPAVPSREAEG
EETELTTPVLPEETQEEDAKKTFKESREAALNLAYILIPSIPLLLLLV
VTTVVCWVWICRKRKREQPDPSTKKQHTIWPSPHQGNSPDLEVYNVIR
KQSEADLAETRPDLKNISFRVCSGEATPDDMSCDYDNMAVNPSESGFV
TLVSVESGFVTNDIYEFSPDQMGRSKESGWVENEIYGY*
>ENSG00000204381_ENST00000375615_
ENSP00000364765_LAYN
(SEQ ID NO: 2)
MRPGTALQAVLLAVLLVGLRAATGRLLSASDLDLRGGQPVCRGGTQRP
CYKVIYFHDTSRRLNFEEAKEACRRDGGQLVSIESEDEQKLIEKFIEN
LLPSDGDFWIGLRRREEKQSNSTACQDLYAWTDGSISQFRNWYVDEPS
CGSEVCVVMYHQPSAPAGIGGPYMFQWNDDRCNMKNNFICKYSDEKPA
VPSREAEGEETELTTPVLPEETQEEDAKKTFKESREAALNLAYILIPS
IPLLLLLVVTTVVCWVWICRKRKREQPDPSTKKQHTIWPSPHQGNSPD
LEVYNVIRKQSEADLAETRPDLKNISFRVCSGEATPDDMSCDYDNMAV
NPSESGFVTLVSVESGFVTNDIYEFSPDQMGRSKESGWVENEIYGY*
>ENSG00000204381_ENST00000436913_
ENSP00000392942_LAYN
(SEQ ID NO: 3)
MVTSGLGSGGVRRNKAIAQPARTFMLGLMAAYHNLEKPAVPSREAEGE
ETELTTPVLPEETQEEDAKKTFKESREAALNLAYILIPSIPLLLLLVV
TTVVCWVWICRKRKREQPDPSTKKQHTIWPSPHQGNSPDLEVYNVIRK
QSEADLAETRPDLKNISFRVCSGEATPDDMSCDYDNMAVNPSESGFVT
LVSVESGFVTNDIYEFSPDQMGRSKESGWVENEIYGY*
>ENSG00000204381_ENST00000525126_
ENSP00000434328_LAYN
(SEQ ID NO: 4)
MRPGTALQAVLLAVLLVGLRAATGRLLSASDLDLRGGQPVCRGGTQRP
CYKVIYFHDTSRRLNFEEAKEACRRDGGQLVSIESEDEQKLIEKFIEN
LLPSDGDFWIGLRRREEKQSNSTACQDLYAWTDGSISQFRNWYVDEPS
CGSEVCVVMYHQPSAPAGIGGPYMFQWNDDRCNMKNNFICKYSDEKPA
VPSREAEGEETELTTPVLPEETQEEDAKKTFKESREAALNLAYILIPS
IPLLLLLVVTTVVCWVWICRKRQKTGAARP*
>ENSG00000204381_ENST00000525866_
ENSP00000434300_LAYN
(SEQ ID NO: 5)
MRPGTALQAVLLAVLLVGLRAATGRLLSGQPVCRGGTQRPCYKVIYFH
DTSRRLNFEEAKEACRRDGGQLVSIESEDEQKLIEKFIENLLPSDGDF
WIGLRRREEKQSNSTACQDLYAWTDGSISQFRETSSSF*
>ENSG00000204381_ENST00000528924_
ENSP00000486561_LAYN
(SEQ ID NO: 6)
MVTSGLGSGGVRRNKAIAQPARTFMLGLMAAYHNLEKPAVPSREAEGE
ETELTTPVLPEETQEEDAKKTFKESREAALNLAYILIPSIPLLLLLVV
TTVVCWVWICRK
>ENSG00000204381_ENST00000530962_
ENSP00000431627_LAYN
(SEQ ID NO: 7)
MYHQPSAPAGIGGPYMFQWNDDRCNMKNNFICKYSDEKPAVPSREAEG
EETELTTPVLPEETQEEDAKKTFKESREAALNLAYILIPSIPLLLLLV
VTTVVCWVWICRK
>ENSG00000204381_ENST00000533265_
ENSP00000434972_LAYN
(SEQ ID NO: 8)
MRPGTALQAVLLAVLLVGLRAATGRLLSGQPVCRGGTQRPCYKVIYFH
DTSRRLNFEEAKEACRRDGGQLVSIESEDEQKLIEKFIENLLPSDGDF
WIGLRRREEKQSNSTACQDLYAWTDGSISQFRNWYVDEPSCGSEVCVV
MYHQPSAPAGIGGPYMFQWNDDRCNMKNNFICKYSDEKPAVPSREAEG
EETELTTPVLPEETQEEDAKKTFKESREAALNLAYILIPSIPLLLLLV
VTTVVCWVWICRKRQKTGAARP*
>ENSG00000204381_ENST00000533999_
ENSP00000432434_LAYN
(SEQ ID NO: 9)
MYHQPSAPAGIGGPYMFQWNDDRCNMKNNFICKYSDEKPAVPSREAEG
E]),
CCR8 (SEQ ID Nos: 10-11
[>ENSG00000179934_ENST00000326306_
ENSP00000326432_CCR8
(SEQ ID NO: 10)
MDYTLDLSVTTVTDYYYPDIFSSPCDAELIQTNGKLLLAVFYCLLFVF
SLLGNSLVILVLVVCKKLRSITDVYLLNLALSDLLFVFSFPFQTYYLL
DQWVFGTVMCKVVSGFYYIGFYSSMFFITLMSVDRYLAVVHAVYALKV
RTIRMGTTLCLAVWLTAIMATIPLLVFYQVASEDGVLQCYSFYNQQTL
KWKIFTNFKMNILGLLIPFTIFMFCYIKILHQLKRCQNHNKTKAIRLV
LIVVIASLLFWVPFNVVLFLTSLHSMHILDGCSISQQLTYATHVTEII
SFTHCCVNPVIYAFVGEKFKKHLSEIFQKSCSQIFNYLGRQMPRESCE
KSSSCQQHSSRSSSVDYIL*
>ENSG00000179934_ENST00000414803_
ENSP00000390104_CCR8
(SEQ ID NO: 11)
MDYTLDLSVTTVTDYYYPDIFSSPCDAELIQTNDLLSAGPVGVWDCNV
QSGVWLLLHWLLQQHVFHHPHECGQVPGCCPCRVCPKGEDDQDGHNAV
PGSMANRHYGYHPIASVLPSGL*]),
IL21R (SEQ ID Nos: 12-14
[>ENSG00000103522_ENST00000337929_
ENSP00000338010_IL21R
(SEQ ID NO: 12)
MPRGWAAPLLLLLLQGGWGCPDLVCYTDYLQTVICILEMWNLHPSTLT
LTWQDQYEELKDEATSCSLHRSAHNATHATYTCHMDVFHFMADDIFSV
NITDQSGNYSQECGSFLLAESIKPAPPFNVTVTFSGQYNISWRSDYED
PAFYMLKGKLQYELQYRNRGDPWAVSPRRKLISVDSRSVSLLPLEFRK
DSSYELQVRAGPMPGSSYQGTWSEWSDPVIFQTQSEELKEGWNPHLLL
LLLLVIVFIPAFWSLKTHPLWRLWKKIWAVPSPERFFMPLYKGCSGDF
KKWVGAPFTGSSLELGPWSPEVPSTLEVYSCHPPRSPAKRLQLTELQE
PAELVESDGVPKPSFWPTAQNSGGSAYSEERDRPYGLVSIDTVTVLDA
EGPCTWPCSCEDDGYPALDLDAGLEPSPGLEDPLLDAGTTVLSCGCVS
AGSPGLGGPLGSLLDRLKPPLADGEDWAGGLPWGGRSPGGVSESEAGS
PLAGLDMDTFDSGFVGSDCSSPVECDFTSPGDEGPPRSYLRQWVVIPP
PLSSPGPQAS*
>ENSG00000103522_ENST00000395754_
ENSP00000379103_IL21R
(SEQ ID NO: 13)
MPRGWAAPLLLLLLQGGWGCPDLVCYTDYLQTVICILEMWNLHPSTLT
LTWQDQYEELKDEATSCSLHRSAHNATHATYTCHMDVFHFMADDIFSV
NITDQSGNYSQECGSFLLAESIKPAPPFNVTVTFSGQYNISWRSDYED
PAFYMLKGKLQYELQYRNRGDPWAVSPRRKLISVDSRSVSLLPLEFRK
DSSYELQVRAGPMPGSSYQGTWSEWSDPVIFQTQSEELKEGWNPHLLL
LLLLVIVFIPAFWSLKTHPLWRLWKKIWAVPSPERFFMPLYKGCSGDF
KKWVGAPFTGSSLELGPWSPEVPSTLEVYSCHPPRSPAKRLQLTELQE
PAELVESDGVPKPSFWPTAQNSGGSAYSEERDRPYGLVSIDTVTVLDA
EGPCTWPCSCEDDGYPALDLDAGLEPSPGLEDPLLDAGTTVLSCGCVS
AGSPGLGGPLGSLLDRLKPPLADGEDWAGGLPWGGRSPGGVSESEAGS
PLAGLDMDTFDSGFVGSDCSSPVECDFTSPGDEGPPRSYLRQWVVIPP
PLSSPGPQAS*
>ENSG00000103522_ENST00000564089_
ENSP00000456707_IL21R
(SEQ ID NO: 14)
MPRGWAAPLLLLLLQGGWGCPDLVCYTDYLQTVICILEMWNLHPSTLT
LTWQDQYEELKDEATSCSLHRSAHNATHATYTCHMDVFHFMADDIFSV
NITDQSGNYSQECGSFLLAESIKPAPPFNVTVTFSGQYNISWRSDYED
PAFYMLKGKLQYELQYRNRGDPWAVSPRRKLISVDSRSVSLLPLEFRK
DSSYELQVRAGPMPGSSYQGTWSEWSDPVIFQTQSEELKEGWNPHLLL
LLLLVIVFIPAFWSLKTHPLWRLWKKIWAVPSPERFFMPLYKGCSGDF
KKWVGAPFTGSSLELGPWSPEVPSTLEVYSCHPPRSPAKRLQLTELQE
PAELVESDGVPKPSFWPTAQNSGGSAYSEERDRPYGLVSIDTVTVLDA
EGPCTWPCSCEDDGYPALDLDAGLEPSPGLEDPLLDAGTTVLSCGCVS
AGSPGLGGPLGSLLDRLKPPLADGEDWAGGLPWGGRSPGGVSESEAGS
PLAGLDMDTFDSGFVGSDCSSPVECDFTSPGDEGPPRSYLRQWVVIPP
PLSSPGPQAS*]).

[0028] Said cytokine is preferably selected from the group of consisting of: IL32 (SEQ ID Nos: 19-30), IL7 (SEQ ID Nos: 168-174), EBI3 (SEQ ID NO: 175), SECTM1 (SEQ ID Nos: 349-356), CSF1 (SEQ ID Nos: 585-592) and LTA (SEQ ID Nos: 657-658).

[0029] Said epigenetic factor is preferably selected from the group of consisting of: TDRD3 (SEQ ID NO: 712-718), KAT2B (SEQ ID NO:719), FOXA1 (SEQ ID Nos: 720-721) and RCBTB1 (SEQ ID Nos: 722-723).

[0030] Said kinase phosphatase is preferably selected from the group of consisting of: GSK3B (SEQ ID Nos: 724-725), SSH1 (SEQ ID NOS:111-112), CDK6 (SEQ ID Nos: 726-727), MINPP1 (SEQ ID Nos:181-183), PTPRJ (SEQ ID Nos: 395-400), CALM3 (SEQ ID Nos: 728-734) and PTP4A3 (SEQ ID Nos: 593-598).

[0031] Said transcription factor is preferably selected from the group of consisting of:

[0032] VDR (SEQ ID NO:204), ZNF334 (SEQ ID Nos: 736-741), CREB3L2 (SEQ ID Nos: 565-567), ETV7 (SEQ ID NO:31 or 32), SOX4 (SEQ ID NO:735), TWIST1 (SEQ ID Nos: 743-745), TP73 (SEQ ID Nos: 746-756), FOXP3, NFE2L3 (SEQ ID NO:76), ARNTL2 (SEQ ID Nos: 757-764), BATF (SEQ ID Nos: 765-766), PTTG1 (SEQ ID Nos: 767-770), HIVEP3 (SEQ ID Nos: 771-772), FOXA1 (SEQ ID Nos: 720-721), ZBTB38 (SEQ ID NO:561), FOXM1 (SEQ ID Nos: 773-778), TADA3 (SEQ ID Nos: 779-782), NFAT5 (SEQ ID NO:160, 783-791, 742).

[0033] In a preferred embodiment, the marker is MAGEH1 (SEQ ID NO: 708 or 709)

[MAGEH1_Entrez: 28986_ENSG00000187601_
ENST00000342972_ENSP00000343706
(SEQ ID NO: 708)
ATGCCTCGGGGACGAAAGAGTCGGCGCCGCCGTAATGCGAGAGCCGCA
GAAGAGAACCGCAACAATCGCAAAATCCAGGCCTCAGAGGCCTCCGAG
ACCCCTATGGCCGCCTCTGTGGTAGCGAGCACCCCCGAAGACGACCTG
AGCGGCCCCGAGGAAGACCCGAGCACTCCAGAGGAGGCCTCTACCACC
CCTGAAGAAGCCTCGAGCACTGCCCAAGCACAAAAGCCTTCAGTGCCC
CGGAGCAATTTTCAGGGCACCAAGAAAAGTCTCCTGATGTCTATATTA
GCGCTCATCTTCATCATGGGCAACAGCGCCAAGGAAGCTCTGGTCTGG
AAAGTGCTGGGGAAGTTAGGAATGCAGCCTGGACGTCAGCACAGCATC
TTTGGAGATCCGAAGAAGATCGTCACAGAAGAGTTTGTGCGCAGAGGG
TACCTGATTTATAAACCGGTGCCCCGTAGCAGTCCGGTGGAGTATGAG
TTCTTCTGGGGGCCCCGAGCACACGTGGAATCGAGCAAACTGAAAGTC
ATGCATTTTGTGGCAAGGGTTCGTAACCGATGCTCTAAAGACTGGCCT
TGTAATTATGACTGGGATTCGGACGATGATGCAGAGGTTGAGGCTATC
CTCAATTCAGGTGCTAGGGGTTATTCCGCCCCTTAA
(SEQ ID NO: 709)
MPRGRKSRRRRNARAAEENRNNRKIQASEASETPMAASVVASTPEDDL
SGPEEDPSTPEEASTTPEEASSTAQAQKPSVPRSNFQGTKKSLLMSIL
ALIFIMGNSAKEALVWKVLGKLGMQPGRQHSIFGDPKKIVTEEFVRRG
YLIYKPVPRSSPVEYEFFWGPRAHVESSKLKVMHFVARVRNRCSKDWP
CNYDWDSDDDAEVEAILNSGARGYSAP*].

[0034] In the present invention, the tumor is preferably a solid or liquid tumor. Preferably, the solid tumor is selected from the group consisting of: non-small cell lung cancer, colorectal cancer, breast cancer, gastric cancer.

[0035] In a preferred embodiment of the invention, the tumor is a metastasis, preferably a bone, a brain or a liver metastasis.

[0036] Preferably, the metastasis derives from colon rectal cancer or non-small-cell lung cancer.

[0037] Another object of the invention is the above defined molecule for use in a method for in vivo depleting tumor-infiltrating regulatory T cells in a subject or for use in a method to enhance tumor immunity in a subject.

[0038] Another object of the invention is a pharmaceutical composition comprising the molecule as defined above and at least one pharmaceutically acceptable carrier.

[0039] A further object of the invention is a pharmaceutical composition comprising the molecule as above defined, for use in the prevention and/or treatment of tumor or for use in a method for in vivo depleting tumor-infiltrating regulatory T cell in a subject or for use in a method to enhance tumor immunity in a subject.

[0040] The pharmaceutical composition according to the invention may further comprise a therapeutic agent, preferably the therapeutic agent in an anti-tumoral agent.

[0041] Another object of the invention is an in vitro method for diagnosing and/or assessing the risk of developing and/or prognosing and/or for monitoring the progression and/or for monitoring the efficacy of a therapeutic treatment and/or for the screening of a therapeutic treatment of a tumour in a subject comprising the steps of:

[0042] a) detecting at least one of the marker as above defined in an isolated biological sample obtained from the subject and

[0043] b) comparing with respect to a proper control.

[0044] Another object of the invention is an in vitro or ex-vivo method for diagnosing and/or assessing the risk of developing and/or prognosing and/or for monitoring the progression and/or for monitoring the efficacy of a therapeutic treatment and/or for the screening of a therapeutic treatment of a tumour in a subject as above defined, wherein the marker to be detected is at least one of the marker selected from the group consisting of: LAYN, MAGEH1 and CCR8.

[0045] Preferably the above method is for prognosing of colorectal cancer or non-small cell lung cancer in a subject and comprises the steps of:

[0046] a) detecting at least one of the marker selected from the group consisting of:

[0047] LAYN, MAGEH1 and CCR8

[0048] in an isolated biological sample obtained from the subject and

[0049] b) comparing with respect to a proper control,

[0050] wherein an amount of said at least one marker in the isolated biological sample obtained from the subject higher than the control amount indicates that the subject has a poor prognosis.

[0051] In the above method, preferably step a) comprises measuring the amount of the marker or of fragments thereof or of the polynucleotide coding for said protein (DNA or mRNA) or of fragments thereof in said isolated biological sample obtained from the subject and step b) comprises comparing the measured amount of step a) with a proper control amount.

[0052] Preferably, the in vitro method for monitoring the progression and/or for monitoring the efficacy of a therapeutic treatment of a tumour, as above defined, comprises the steps of:

[0053] a) measuring the alteration of the amount or the alteration of the activity of the above markers or of fragments thereof or of the polynucleotide coding for said protein or fragments thereof in said isolated biological sample obtained from the subject and

[0054] b) comparing the measured alteration of step a) with a proper control alteration.

[0055] Another object of the invention is a method for the treatment and/or prevention of tumor comprising administering to a subject the molecule as above defined.

[0056] A further object is a method for identifying a molecule acting as an anti-tumoral, comprising the steps of:
[0057] assaying candidate molecules for their binding specificity to the at least one marker as above defined;
[0058] selecting molecules having a specific binding activity to the at least one marker as above defined;
[0059] testing such specific binding molecules for their capacity of inhibiting proliferation and/or inducing an apoptotic response in a cell system,

[0060] preferably by selectively depleting tumor-infiltrating regulatory T cell, more preferably by inducing antibody-dependent cell-mediated cytotoxicity (ADCC).

[0061] Preferably, the biological sample is a fluid, a cell or a tissue sample, more preferably said sample is plasma or serum.

[0062] The term “biological sample” encompasses a clinical sample, and also includes tissue obtained by surgical resection, tissue obtained by biopsy, cells in culture, cell supernatants, cell lysates, tissue samples, organs, bone marrow, blood, plasma, serum, and the like.

[0063] A “sample” in the context of the present teachings refers to any biological sample that is isolated from a subject. A sample can include, without limitation an aliquot of body fluid, whole blood, serum, plasma, solid tissue samples such as tissue biopsies, or tissue cultures or cells derived therefrom and the progeny thereof, synovial fluid, lymphatic fluid, ascites fluid, and interstitial or extracellular fluid. The term “sample” also encompasses the fluid in spaces between cells, including gingival crevicular fluid, bone marrow, cerebrospinal fluid (CSF), saliva, mucous, sputum, semen, sweat, urine, or any other bodily fluids. “Blood sample” can refer to whole blood or any fraction thereof, including serum and plasma. Samples can be obtained from a subject by means including but not limited to venipuncture, excretion, ejaculation, massage, biopsy, needle aspirate, lavage, scraping, surgical incision, or intervention or other means known in the art. The definition also includes samples that have been manipulated in any way after their procurement, such as by treatment with reagents; washed; or enrichment for certain cell populations, such as cancer cells or samples in which regulatory T cells, are isolated and then analyzed. The definition also includes sample that have been enriched for particular types of molecules, e.g., nucleic acids, polypeptides, etc.

[0064] Another object of the invention is a kit for carrying out the above methods, comprising
[0065] means to measure the amount or the activity of the above markers or of fragments thereof and/or means to measure the amount of the polynucleotide coding for said protein or of fragments thereof and optionally,
[0066] control means.

[0067] Any combination of the above markers is comprised within the present invention. Preferred combinations of markers are LAYN and MAGEH1; LAYN and CCR8; CCR8 and MAGEH1; LAYN, MAGEH1 and CCR8.

[0068] Preferably, the above polynucleotide is an RNAi inhibitor, preferably selected from the group consisting of: siRNA, miRNA, shRNA, stRNA, snRNA, and antisense nucleic acid, or a functional derivative thereof.

[0069] A comparative analysis of gene expression arrays from CD4+ T cells infiltrating NSCLC and CRC revealed Treg-specific expression of 328 markers as listed in Table IV Manipulation of Treg cells via these markers can therefore be used to enhance immunotherapy of cancer.

[0070] The expression “molecule able to modulate” and “modulator” are herein interchangeable. By the term “modulator” it is meant a molecule that effects a change in the expression and/or function of at least one marker as above defined.

[0071] The change is relative to the normal or baseline level of expression and/or function in the absence of the modulator, but otherwise under similar conditions, and it may represent an increase (e.g. by using an inducer or activator) or a decrease (e.g. by using a suppressor or inhibitor) in the normal/baseline expression and/or function. In the context of the present invention, a “modulator” is a molecule which may suppress or inhibit the expression and/or function of at least one marker that is selectively deregulated in tumor-infiltrating regulatory T cell for use in the prevention and/or treatment of cancer.

[0072] By the term “suppressor or inhibitor” or a “molecule which (selectively) suppresses or inhibits” it is meant a molecule that effects a change in the expression and/or function of the target.

[0073] In the context of the present invention, a “modulator” is a molecule which may induce or activate the expression and/or function of at least one marker that is selectively deregulated in tumor-infiltrating regulatory T cell for use in the prevention and/or treatment of cancer.

[0074] The change is relative to the normal or baseline level of expression and/or function in the absence of the modulator, but otherwise under similar conditions, and it may represent an increase (e.g. by using an inducer or activator) or a decrease (e.g. by using a suppressor or inhibitor) in the normal/baseline expression and/or function.

[0075] The suppression or inhibition of the expression and/or function of the target may be assessed by any means known to the skilled in the art. The assessment of the expression level or of the presence of the target is preferably performed using classical molecular biology techniques such as (real time Polymerase Chain Reaction) qPCR, microarrays, bead arrays, RNAse protection analysis or Northern blot analysis or cloning and sequencing.

[0076] The assessment of target function is preferably performed by in vitro suppression assay, whole transcriptome analysis, mass spectrometry analysis to identify proteins interacting with the target.

[0077] In the context of the present invention, the target (or the marker) may be the gene, the mRNA, the cDNA, or the encoded protein thereof, including fragments, derivatives, variants, isoforms, etc. Preferably, the marker is characterized by its Accession numbers (i.e. NCBI Entrez ID; Ensembl Gene accession number (ENSG), Ensembl transcript accession number (ENST) and Ensembl protein accession number (ENSP), retrievable in the public database EnsEMBL (http://www.ensembl.org) and/or amino acid and nucleotide sequences, herein disclosed.

[0078] In the context of the present invention, the term “treat” (or “treated”, “treatment”, etc.) when referred to CD4+ T cell, means e.g. the exposure of the cell to an exogenous modulator as above defined. The overexpression may be obtained e.g. by infecting the cells with a viral vector expressing the molecule of the invention. The inhibition of marker expression may e.g. by obtained by transfection with polynucleotide, as e.g. with siRNAs. The term “treat” may also mean that the cells are manipulated in order to overexpress or silence the marker. The overexpression or the silencing may be obtained e.g. by genetically modifying the cells.

[0079] Control means can be used to compare the amount or the increase of amount of the marker defined to a proper control. The proper control may be obtained for example, with reference to known standard, either from a normal subject or from normal population, or from T cells different from tumour infiltrating regulatory T cells or regulatory T cells.

[0080] The means to measure the amount of at least one marker as above defined are preferably at least one antibody, functional analogous or derivatives thereof. Said antibody, functional analogous or derivatives thereof are specific for said marker.

[0081] In the context of the present invention, the antibody is preferably selected from the group consisting of an intact immunoglobulin, a Fv, a scFv (single chain Fv fragment), a Fab, a F(ab′)2, an “antibody-like” domain, an “antibody-mimetic domain”, a single antibody domain (VH domain or VL domains), a multimeric antibody, recombinant or synthetic antigen-binding fragments, a peptide or a proteolytic fragment containing the epitope binding region. The terms “antibody” and “immunoglobulin” can be used interchangeably and are herein used in the broadest sense and encompass various antibodies and antibody mimetics structures, including but not limited to monoclonal antibodies, polyclonal antibodies, multispecific antibodies (e.g., bispecific antibodies), chimeric antibodies, nanobodies, antibody derivatives, antibody fragments, anticalins, DARPins, affibodies, affilins, affimers, affitins, alphabodies, avimers, fynomers, monobodies and other binding domains, so long as they exhibit the desired antigen-binding activity.

[0082] The term immunoglobulin also includes “conjugate” thereof. In the context of the present invention “conjugate” in relation to the antibody of the invention includes antibodies (or fragments thereof) conjugated with a substance (a compound, etc.) having a therapeutic activity, e.g. anti-tumor activity and/or cell-killing activity or a cytotoxic agents such as various A chain toxins, ribosomes inactivating proteins, and ribonucleases; bispecific antibodies designed to induce cellular mechanisms for killing tumors (see, for example, U.S. Pat. Nos. 4,676,980 and 4,954,617). The conjugate may be formed by previously preparing each of the aforementioned antibody molecule and the aforementioned substance having anti-tumor activity and/or cell-killing activity, separately, and then combining them (immunoconjugate) or by ligating a protein toxin used as such a substance having anti-tumor activity and/or cell-killing activity to an antibody gene on a gene according to a genetic recombination technique, so as to allow it to express as a single protein (a fusion protein) (immunotoxin).

[0083] An “antibody fragment” refers to a molecule other than an intact antibody that comprises a portion of an intact antibody that binds the antigen to which the intact antibody binds. Examples of antibody fragments include but are not limited to Fv, Fab, Fab′, Fab′-SH, F(ab′)2; diabodies; linear antibodies; single-chain antibody molecules (e.g. scFv); and multispecific antibodies formed from antibody fragments. VH or VL Fvs are also called “Nanobodies”.

[0084] The term “antibody mimetics” refers to those organic compounds or binding domains that are not antibody derivatives but that can bind specifically an antigen like antibodies do. They include anticalins, DARPins, affibodies, affilins, affimers, affitins, alphabodies, avimers, fynomers, monobodies and others.

[0085] The term “chimeric” antibody refers to an antibody in which a portion of the heavy and/or light chain is derived from a particular source or species, while the remainder of the heavy and/or light chain is derived from a different source or species.

[0086] The terms “full length antibody,” “intact antibody,” and “whole antibody” are used herein interchangeably to refer to an antibody having a structure substantially similar to a native antibody structure or having heavy chains that contain an Fc region as defined herein.

[0087] In a preferred embodiment, the kit of the invention comprises:
[0088] a solid phase adhered antibody specific for said compound;
[0089] detection means of the ligand specific-marker complex.

[0090] Alternatively, the reagents can be provided as a kit comprising reagents in a suspension or suspendable form, e.g. reagents bound to beads suitable for flow cytometry, preferably magnetic beads coated with antibody capture. The instructions may comprise instructions for conducting an antibody-based flow cytometry assay.

[0091] Detection means are preferably means able to detect and/or measure the amount of the described markers, e.g. means able to detect the complex antigen-antibody, as enzyme conjugated secondary antibodies, luminescent substrates, magnetic beads coated with antibody capture, customized dried antibody cocktails and/or columns with size filter cartridges and/or combined with specific antibody filter (SAF).

[0092] In an embodiment, the method further comprises selecting a therapeutic regimen based on the analysis. In an embodiment, the method further comprises determining a treatment course for the subject based on the analysis. Other means may be e.g. specific primers and probes for RT PCR. The kits according to the invention can further comprise customary auxiliaries, such as buffers, carriers, markers, etc. and/or instructions for use. In the context of the present invention the term “detecting” may be intended also as “measuring the amount” or “measuring the alteration”. In the case of a method or a kit for assessing the risk and/or diagnosing and/or prognosing of a tumour, the proper control may be a sample taken from a healthy patient or from a patient affected by another disorder or pathology, and the proper control amount or activity may be the amount or activity of the same protein or polynucleotide measured in a sample taken from a healthy patient or from a patient affected by another disorder or pathology.

[0093] In the case of a method or a kit for monitoring the progression of a tumour, the progress of the cancer is monitored and the proper control may be a sample taken from the same subject at various times or from another patient, and the proper control amount or activity may by the amount or activity of the same protein or polynucleotide measured in a sample taken from the same subject at various times or from another patient.

[0094] In the case of a method or a kit for monitoring the efficacy of a therapeutic treatment, the proper control may by a sample taken from the same subject before initiation of the therapy or taken at various times during the course of the therapy and the proper control amount or activity may be the amount or activity of the same protein or polynucleotide measured in a sample taken from the same subject before initiation of the therapy or taken at various times during the course of the therapy.

[0095] In the case of a method or a kit for the screening of a therapeutic treatment, the proper control may be a sample taken from subjects without treatment and from subjects treated with a substance that is to be assayed or from subjects treated with a reference treatment and the proper control amount or activity may be the average of the amounts or activity of the same protein or polynucleotide measured in samples taken from subjects without treatment and from subjects treated with a substance that is to be assayed or from subjects treated with a reference treatment. In this case, if the amount or activity of MAGEH1 and/or LAYN and/or CCR8 or polynucleotides thereof in the isolated biological sample obtained from the subject is lower or equal than the control amount or activity, it may indicate that the tested substance is effective for the treatment of the tumour.

[0096] In the present invention, the expression “measuring the amount” can be intended as measuring the amount (or the activity) or concentration or level of the respective protein and/or mRNA thereof and/or DNA thereof, preferably semi-quantitative or quantitative. Measurement of a protein can be performed directly or indirectly. Direct measurement refers to the amount or concentration measure of the marker, based on a signal obtained directly from the protein, and which is directly correlated with the number of protein molecules present in the sample. This signal—which can also be referred to as intensity signal—can be obtained, for example, by measuring an intensity value of a chemical or physical property of the marker. Indirect measurements include the measurement obtained from a secondary component (e.g., a different component from the gene expression product) and a biological measurement system (e.g. the measurement of cellular responses, ligands, “tags” or enzymatic reaction products).

[0097] The term “amount”, as used in the description refers but is not limited to the absolute or relative amount of proteins and/or mRNA thereof and/or DNA thereof, and any other value or parameter associated with the same or which may result from these. Such values or parameters comprise intensity values of the signal obtained from either physical or chemical properties of the protein, obtained by direct measurement, for example, intensity values in an immunoassay, mass spectroscopy or a nuclear magnetic resonance. Additionally, these values or parameters include those obtained by indirect measurement, for example, any of the measurement systems described herein. Methods of measuring mRNA and DNA in samples are known in the art. To measure nucleic acid levels, the cells in a test sample can be lysed, and the levels of mRNA in the lysates or in RNA purified or semi-purified from lysates can be measured by any variety of methods familiar to those in the art. Such methods include hybridization assays using detectably labeled DNA or RNA probes (i.e., Northern blotting) or quantitative or semi-quantitative RT-PCR methodologies using appropriate oligonucleotide primers. Alternatively, quantitative or semi-quantitative in situ hybridization assays can be carried out using, for example, tissue sections, or unlysed cell suspensions, and detectably labeled (e.g., fluorescent, or enzyme-labeled) DNA or RNA probes. Additional methods for quantifying mRNA include RNA protection assay (RPA), cDNA and oligonucleotide microarrays, representation difference analysis (RDA), differential display, EST sequence analysis, and serial analysis of gene expression (SAGE).

[0098] If by comparing the measured amount or activity of the above markers or of the polynucleotide coding for said protein with the amount or activity obtained from a control sample, the amount or the activity of said marker in the sample isolated from the subject corresponds to a higher value, the subject may present cancer or go towards an aggravation of said disease.

[0099] If by comparing the measured amount or activity of the above markers or of the polynucleotide coding for said protein with the amount or the activity obtained from a control sample, the amount or the activity of said marker in the sample isolated from the subject corresponds to a similar or lower value, the subject may be not affected by cancer or go toward an amelioration of cancer, respectively.

[0100] Alternatively, the expression “detecting” or “measuring the amount” is intended as measuring the alteration of the molecule. Said alteration can reflect an increase or a decrease in the amount or activity of the molecules as above defined. An increase of the protein or of the activity of the marker or of the polynucleotide coding for said marker can be correlated to an aggravation of cancer. A decrease of the protein or of the activity of said marker or of the polynucleotide coding for said protein can be correlated to an amelioration of cancer or to recovery of the subject.

[0101] The expression “marker” is intended to include also the corresponding protein encoded from said marker orthologous or homologous genes, functional mutants, functional derivatives, functional fragments or analogues, isoforms, splice variants thereof.

[0102] When the expression “marker” is referred to genes, it is intended to include also the corresponding orthologous or homologous genes, functional mutants, functional derivatives, functional fragments or analogues, isoforms thereof.

[0103] As used herein “fragments” refers to polynucleotides having preferably a length of at least 1000 nucleotides, 1100 nucleotide, 1200 nucleotides, 1300 nucleotides, 1400 nucleotides, 1500 nucleotides.

[0104] As used herein “fragments” refers to polypeptides having preferably a length of at least 10 amino acids, more preferably at least 15, at least 17 amino acids or at least 20 amino acids, even more preferably at least 25 amino acids or at least 37 or 40 amino acids, and more preferably of at least 50, or 100, or 150 or 200 or 250 or 300 or 350 or 400 or 450 or 500 amino acids.

[0105] The term “polynucleotide” also refers to modified polynucleotides.

[0106] As used herein, the term “vector” refers to an expression vector, and may be for example in the form of a plasmid, a viral particle, a phage, etc. Such vectors may include bacterial plasmids, phage DNA, baculovirus, yeast plasmids, vectors derived from combinations of plasmids and phage DNA, viral DNA such as vaccinia, adenovirus, lentivirus, fowl pox virus, and pseudorabies. Large numbers of suitable vectors are known to those of skill in the art and are commercially available.

[0107] The polynucleotide sequence, preferably the DNA sequence in the vector is operatively linked to an appropriate expression control sequence(s) (promoter) to direct mRNA synthesis. As representative examples of such promoters, one can mention prokaryotic or eukaryotic promoters such as CMV immediate early, HSV thymidine kinase, early and late SV40, LTRs from retrovirus, and mouse metallothionein-I. The expression vector may also contain a ribosome binding site for translation initiation and a transcription vector. The vector may also include appropriate sequences for amplifying expression. In addition, the vectors preferably contain one or more selectable marker genes to provide a phenotypic trait for selection of transformed host cells such as dihydro folate reductase or neomycin resistance for eukaryotic cell culture, or such as tetracycline or ampicillin resistance in E. coli.

[0108] As used herein, the term “host cell genetically engineered” relates to host cells which have been transduced, transformed or transfected with the polynucleotide or with the vector described previously. As representative examples of appropriate host cells, one can cite bacterial cells, such as E. coli, Streptomyces, Salmonella typhimurium, fungal cells such as yeast, insect cells such as Sf9, animal cells such as CHO or COS, plant cells, etc. The selection of an appropriate host is deemed to be within the scope of those skilled in the art from the teachings herein. Preferably, said host cell is an animal cell, and most preferably a human cell.

[0109] The introduction of the polynucleotide or of the vector described previously into the host cell can be effected by method well known from one of skill in the art such as calcium phosphate transfection, DEAE-Dextran mediated transfection, electroporation, lipofection, microinjection, viral infection, thermal shock, transformation after chemical permeabilisation of the membrane or cell fusion.

[0110] The polynucleotide may be a vector such as for example a viral vector.

[0111] The polynucleotides as above defined can be introduced into the body of the subject to be treated as a nucleic acid within a vector which replicates into the host cells and produces the polynucleotides or the proteins.

[0112] Suitable administration routes of the pharmaceutical composition of the invention include, but are not limited to, oral, rectal, transmucosal, intestinal, enteral, topical, suppository, through inhalation, intrathecal, intraventricular, intraperitoneal, intranasal, intraocular and parenteral (e.g., intravenous, intramuscular, intramedullary, and subcutaneous). An additional suitable administration route includes chemoembolization. Other suitable administration methods include injection, viral transfer, use of liposomes, e.g. cationic liposomes, oral intake and/or dermal application.

[0113] In certain embodiments, a pharmaceutical composition of the present invention is administered in the form of a dosage unit (e.g., tablet, capsule, bolus, etc.).

[0114] For pharmaceutical applications, the composition may be in the form of a solution, e.g. an injectable solution, emulsion, suspension or the like. The carrier may be any suitable pharmaceutical carrier. Preferably, a carrier is used which is capable of increasing the efficacy of the RNA molecules to enter the target cells. Suitable examples of such carriers are liposomes.

[0115] The modulator as above defined is administered in a pharmaceutically effective dosage, which in the case of polynucleotides may be in the range of 0.001 pg/kg body weight to 10 mg/kg body weight depending on the route of administration and the type or severity of the disease.

[0116] The term “pharmaceutical composition” refers to a preparation which is in such form as to permit the biological activity of an active ingredient contained therein to be effective, and which contains no additional components which are unacceptably toxic to a subject to which the formulation would be administered. In the present invention the term “effective amount” shall mean an amount which achieves a desired effect or therapeutic effect as such effect is understood by those of ordinary skill in the art. In the present invention, the antibody may be administered simultaneously or sequentially with another therapeutic treatment, that may be a chemotherapy or radiotherapy. The invention provides formulations comprising a therapeutically effective amount of an antibody as disclosed herein, a buffer maintaining the pH in the range from about 4.5 to about 8.5, and, optionally, a surfactant. The formulations are typically for an antibody as disclosed herein, recombinant or synthetic antigen-binding fragments thereof of the invention as active principle concentration from about 0.1 mg/ml to about 100 mg/ml. In certain embodiments, the antibody, recombinant or synthetic antigen-binding fragments thereof concentration is from about 0.1 mg/ml to 1 mg/ml; preferably from 1 mg/ml to 10 mg/ml, preferably from 10 to 100 mg/ml.

[0117] Therapeutic formulations of the antibody/antibodies can be prepared by mixing the antibody having the desired degree of purity with optional physiologically acceptable carriers, excipients or stabilizers (Remington's Pharmaceutical Sciences 16th edition, Osol, A. Ed., 1980), in the form of lyophilized formulations or aqueous solutions.

[0118] Pharmaceutical compositions containing the antibody of the present invention may be manufactured by processes well known in the art, e.g., using a variety of well-known mixing, dissolving, granulating, levigating, emulsifying, encapsulating, entrapping or lyophilizing processes. Proper formulation is dependent upon the route of administration chosen. Parenteral routes are preferred in many aspects of the invention.

[0119] For injection, including, without limitation, intravenous, intramuscular and subcutaneous injection, the compounds of the invention may be formulated in aqueous solutions, preferably in physiologically compatible buffers such as physiological saline buffer or polar solvents including, without limitation, a pyrrolidone or dimethylsulfoxide.

[0120] Formulations for injection may be presented in unit dosage form, e.g. in ampoules or in multi-dose containers. Useful compositions include, without limitation, suspensions, solutions or emulsions in oily or aqueous vehicles, and may contain adjuncts such as suspending, stabilizing and/or dispersing agents. Pharmaceutical compositions for parenteral administration include aqueous solutions of a water soluble form, such as, without limitation, a salt of the active compound. Additionally, suspensions of the active compounds may be prepared in a lipophilic vehicle. Suitable lipophilic vehicles include fatty oils such as sesame oil, synthetic fatty acid esters such as ethyl oleate and triglycerides, or materials such as liposomes. Aqueous injection suspensions may contain substances that increase the viscosity of the suspension, such as sodium carboxymethyl cellulose, sorbitol, or dextran. Optionally, the suspension may also contain suitable stabilizers and/or agents that increase the solubility of the compounds to allow for the preparation of highly concentrated solutions. Alternatively, the active ingredient may be in powder form for constitution with a suitable vehicle, e.g., sterile, pyrogen-free water, before use. For administration by inhalation, the antibody of the present invention can conveniently be delivered in the form of an aerosol spray using a pressurized pack or a nebulizer and a suitable propellant. The antibody may also be formulated in rectal compositions such as suppositories or retention enemas, using, e.g., conventional suppository bases such as cocoa butter or other glycerides. In addition to the formulations described previously, the antibody may also be formulated as depot preparations. Such long acting formulations may be administered by implantation (for example, subcutaneously or intramuscularly) or by intramuscular injection. The compounds of this invention may be formulated for this route of administration with suitable polymeric or hydrophobic materials (for instance, in an emulsion with a pharmacologically acceptable oil), with ion exchange resins, or as a sparingly soluble derivative such as, without limitation, a sparingly soluble salt. Additionally, the antibody may be delivered using a sustained-release system, such as semi-permeable matrices of solid hydrophobic polymers containing the therapeutic agent. Other delivery systems such as liposomes and emulsions can also be used.

[0121] A therapeutically effective amount refers to an amount of compound effective to prevent, alleviate or ameliorate cancer or cancer recurrence symptoms. Determination of a therapeutically effective amount is well within the capability of those skilled in the art, especially in light of the disclosure herein. For any antibody used in the invention, the therapeutically effective amount can be estimated initially from in vitro assays. Then, the dosage can be formulated for use in animal models so as to achieve a circulating concentration range that includes the effective dosage. Such information can then be used to more accurately determine dosages useful in patients. The amount of the composition that is administered will depend upon the parent molecule included therein. Generally, the amount used in the treatment methods is that amount which effectively achieves the desired therapeutic result in mammals. Naturally, the dosages of the various compounds can vary somewhat depending upon the compound, rate of in vivo hydrolysis, etc. In addition, the dosage, of course, can vary depending upon the dosage form and route of administration. The range set forth above is illustrative and those skilled in the art will determine the optimal dosing of the compound selected based on clinical experience and the treatment indication. Moreover, the exact formulation, route of administration and dosage can be selected by the individual physician in view of the patient's condition and of the most effective route of administration (e.g., intravenous, subcutaneous, intradermal). Additionally, toxicity and therapeutic efficacy of the antibody and other therapeutic agent described herein can be determined by standard pharmaceutical procedures in cell cultures or experimental animals using methods well-known in the art. It is contemplated that the treatment will be given for one or more cycles until the desired clinical and biological result is obtained. The exact amount, frequency and period of administration of the compound of the present invention will vary, of course, depending upon the sex, age and medical condition of the patient as well as the severity and type of the disease as determined by the attending clinician.

[0122] The modulator of the present invention may comprise a single type of modulator or a plurality of different modulators.

[0123] The function of a regulatory T-cell may be inhibited by inhibiting markers activity and/or expression or by decreasing the number of cells positive for such markers in a T-cell population (for example by binding at least one of the above marker and inducing antibody-dependent cell-mediated cytotoxicity (ADCC)). Inhibiting the function of regulatory T-cells in an organism may be used to enhance the immune T-cell response in those circumstances where such a response is desirable, such as in a patient suffering from cancer.

[0124] When treating a cancer patient with an inhibitory agent that binds to marker protein or mRNA, one may optionally co-administer an anti-tumor vaccine or therapy. Such vaccines may be directed to isolated antigens or to groups of antigens or to whole tumor cells. It may be desirable to administer the inhibitory agent with chemotherapeutic agents or together with radiotherapy.

[0125] Treatment with multiple agents need not be done using a mixture of agents but may be done using separate pharmaceutical preparations. The preparations need not be delivered at the same exact time, but may be coordinated to be delivered to a patient during the same period of treatment, i.e. within a week or a month or each other.

[0126] Thus a composition comprising two active ingredients may be constituted in the body of the patient. Any suitable anti-tumor treatment can be coordinated with the treatments of the present invention targeted to the markers. Similarly, if treating patients with infections, other anti-infection agents can be coordinated with the treatment of the present invention targeted to the markers. Such agents may be small molecule drugs, vaccines, antibodies, etc.

[0127] The number of marker+ cells in a T-cell population can be modified by using an antibody or other agent that selectively binds to the marker. marker+ cells represent an enriched population of regulatory T-cells that can be introduced back into the original source of the T-cells or into another compatible host to enhance regulatory T-cell function. Alternatively, the marker-cells represent a population of T-cells deficient in regulatory T-cell activity that can be reintroduced into the original source of the T-cells or another compatible host to inhibit or reduce regulatory T-cell function while retaining general T-cell activity.

[0128] Any desired means for either increasing or decreasing (modulating) marker activity can be used in the methods of the invention. This includes directly modulating the function of marker protein, modulating marker signal transduction, and modulating expression of marker in T-cells by modulating either transcription or translation or both. Those means which selectively modulate marker activity are preferred over nonselective modulators. Also, those inhibitory means which create a transient marker deficiency in a population of T-cells which then return to normal levels of marker activity may be preferred for treating a temporary T-cell deficiency. The transiently deficient T-cells may be used to reconstitute a diminished T-cell population with T-cells that will be genetically normal with respect to the marker. Modulation of marker activity can be performed on cells in vitro or in whole animals, in vivo. Cells which are treated in vitro can be administered to a patient, either the original source of the cells or an unrelated individual. To inhibit the function of the marker (antagonist), marker antibodies or small molecule inhibitors can be used. Antibodies or antibody fragments that are useful for this purpose will be those that can bind to the marker and block its ability to function. Such antibodies may be polyclonal antibodies, monoclonal antibodies, chimeric antibodies, humanized antibodies, single-chain antibodies, soluble MHC class II molecules, antibody fragments, etc.

[0129] Antibodies generated against marker polypeptides can be obtained by direct injection of the marker polypeptides into an animal or by administering marker polypeptides to an animal, preferably a nonhuman. The antibody so obtained will then bind the marker polypeptides itself. In this manner, even a sequence encoding only a fragment of the marker polypeptide can be used to generate antibodies binding the whole native marker polypeptide.

[0130] For preparation of monoclonal antibodies, any technique which provides antibodies produced by continuous cell line cultures can be used. Examples include the hybridoma technique (Kohler and Milstein, 1975, Nature, 256: 495-497), the trioma technique, the human B-cell hybridoma technique (Kozbor et al., 1983, Immunology Today 4: 72), and the EBV-hybridoma technique to produce human monoclonal antibodies (Cole, et al., 1985, in Monoclonal Antibodies and Cancer Therapy, Alan R. Liss, Inc., pp. 77-96). Techniques described for the production of single chain antibodies (U.S. Pat. No. 4,946,778) can be readily used to produce single chain antibodies to marker polypeptides. Also, transgenic mice may be used to express humanized antibodies to immunogenic marker polypeptides. To enhance or activate the function of the marker, any agent which increases the level of the marker or the activity of existing marker in the T-cell may be used. Such agents may be identified using the screening assays described below. Expression vectors encoding the marker can also be administered to increase the gene dosage. The expression vectors can be plasmid vectors or viral vectors, as are known in the art. Any vector can be chosen by the skilled in the art for particularly desirable properties. In the context of the present invention, the term “polynucleotide” includes DNA molecules (e.g., cDNA or genomic DNA) and RNA molecules (e.g., mRNA, siRNA, shRNA) and analogues of the DNA or RNA generated using nucleotide analogues. The polynucleotide may be single-stranded or double-stranded. The polynucleotide may be synthesized using oligonucleotide analogues or derivatives (e.g., inosine or phosphorothioate nucleotides).

[0131] The RNAi inhibitors as above defined are preferably capable of hybridizing to all or part of specific target sequence. Therefore, RNAi inhibitors may be fully or partly complementary to all of or part of the target sequence

[0132] The RNAi inhibitors may hybridize to the specified target sequence under conditions of medium to high stringency.

[0133] An RNAi inhibitors may be defined with reference to a specific sequence identity to the reverse complement of the sequence to which it is intended to target. The antisense sequences will typically have at least about 75%, preferably at least about 80%, at least about 85%, at least about 90%, at least about 95% or at least about 99% sequence identity with the reverse complements of their target sequences.

[0134] The term polynucleotide and polypeptide also includes derivatives and functional fragments thereof.

[0135] In the context of the present invention, the at least one gene or marker as above defined is preferably characterized by at least one of the sequence identified by its Ensembl Gene ID or NCBI Accession Numbers, as disclosed in Tables VIII or VI, or by at least one of the SEQ ID No. 1-709.

[0136] The term gene herein also includes corresponding orthologous or homologous genes, isoforms, variants, allelic variants, functional derivatives, functional fragments thereof. The expression “protein” is intended to include also the corresponding protein encoded from a corresponding orthologous or homologous genes, functional mutants, functional derivatives, functional fragments or analogues, isoforms thereof.

[0137] The term “analogue” as used herein referring to a protein means a modified peptide wherein one or more amino acid residues of the peptide have been substituted by other amino acid residues and/or wherein one or more amino acid residues have been deleted from the peptide and/or wherein one or more amino acid residues have been deleted from the peptide and or wherein one or more amino acid residues have been added to the peptide. Such addition or deletion of amino acid residues can take place at the N-terminal of the peptide and/or at the C-terminal of the peptide.

[0138] A “derivative” may be a nucleic acid molecule, as a DNA molecule, coding the polynucleotide as above defined, or a nucleic acid molecule comprising the polynucleotide as above defined, or a polynucleotide of complementary sequence. In the context of the present invention the term “derivatives” also refers to longer or shorter polynucleotides and/or polypeptides having e.g. a percentage of identity of at least 41%, 50%, 60%, 65%, 70% or 75%, more preferably of at least 85%, as an example of at least 90%, and even more preferably of at least 95% or 100% with the sequences herein mentioned or with their complementary sequence or with their DNA or RNA corresponding sequence. The term “derivatives” and the term “polynucleotide” also include modified synthetic oligonucleotides. The modified synthetic oligonucleotide are preferably LNA (Locked Nucleic Acid), phosphoro-thiolated oligos or methylated oligos, morpholinos, 2′-O-methyl, 2′-O-methoxyethyl oligonucleotides and cholesterol-conjugated 2′-O-methyl modified oligonucleotides (antagomirs).

[0139] The term “derivative” may also include nucleotide analogues, i.e. a naturally occurring ribonucleotide or deoxyribonucleotide substituted by a non-naturally occurring nucleotide. The term “derivatives” also includes nucleic acids or polypeptides that may be generated by mutating one or more nucleotide or amino acid in their sequences, equivalents or precursor sequences. The term “derivatives” also includes at least one functional fragment of the polynucleotide.

[0140] In the context of the present invention “functional” is intended for example as “maintaining their activity”.

[0141] In the context of the present invention, the vector as above defined is preferably selected from the group consisting of: plasmids, viral vectors and phages, more preferably the viral vector is a lentiviral vector.

[0142] In the context of the present invention, the host cell as above defined is preferably selected from the group consisting of: bacterial cells, fungal cells, insect cells, animal cells, plant cells, preferably being an animal cell.

[0143] Compositions comprising a mixture of antibodies which specifically bind to the marker(s); and an anti-cancer vaccine can be made in vitro. Preferably the composition is made under conditions which render it suitable for use as a pharmaceutical composition. Pharmaceutical compositions may be sterile and pyrogen-free. The components of the composition can also be administered separately to a patient within a period of time such that they are both within the patient's body at the same time. Such a time-separated administration leads to formation of the mixture of antibodies and vaccine within the patient's body. If the antibody and vaccine are to be administered in a time-separated fashion, they may be supplied together in a kit. Within the kit the components may be separately packaged or contained. Other components such as excipients, carriers, other immune modulators or adjuvants, instructions for administration of the antibody and the vaccine, and injection devices can be supplied in the kit as well. Instructions can be in a written, video, or audio form, can be contained on paper, an electronic medium, or even as a reference to another source, such as a website or reference manual.

[0144] Anti-marker antibodies of the invention can be used to increase the magnitude of anti-cancer response of the cancer patient to the anti-cancer vaccine or anti-cancer therapy. It can also be used to increase the number of responders in a population of cancer patients. Thus the antibodies can be used to overcome immune suppression found in patients refractory to anti-cancer vaccines or treatment. The anti-cancer vaccines can be any that are known in the art, including, but not limited to whole tumor cell vaccines, isolated tumor antigens or polypeptides comprising one or more epitopes of tumor antigens.

[0145] Expression of marker in T-cells can be modulated at the transcriptional or translational level. Agents which are capable of such modulation can be identified using the screening assays described below.

[0146] Translation of marker mRNA can be inhibited by using ribozymes, antisense molecules, small interference RNA (siRNA; See Elbashir, S. M. et al., “Duplexes of 21-nucleotide RNAs mediate RNA interference in cultured mammalian cells”, Nature 411: 494-498 (2001)) or small molecule inhibitors of this process which target marker mRNA. Antisense technology can be used to control gene expression through triple-helix formation or antisense DNA or RNA, both of which methods are based on binding of a polynucleotide to DNA or RNA. For example, the 5′coding portion of the polynucleotide sequence, which codes for the mature polypeptides of the present invention, is used to design an antisense RNA oligonucleotide of from about 10 to 40 base pairs in length. A DNA oligonucleotide is designed to be complementary to a region of the gene involved in transcription (triple helix—see Lee et al., Nucl. Acids Res., 6: 3073 (1979); Cooney et al, Science, 241: 456 (1988); and Dervan et al., Science, 251: 1360 (1991)), thereby preventing transcription and the production of the marker. The antisense RNA oligonucleotide hybridizes to the mRNA in vivo and blocks translation of the mRNA molecule into the marker polypeptide (Antisense—Okano, J. Neurochem., 56: 560 (1991); Oligodeoxynucleotides as Antisense Inhibitors of Gene Expression, CRC Press, Boca Raton, Fla. (1988)). The oligonucleotides described above can also be delivered to cells by antisense expression constructs such that the antisense RNA or DNA may be expressed in vivo to inhibit production of the marker. Such constructs are well known in the art. Antisense constructs, antisense oligonucleotides, RNA interference constructs or siRNA duplex RNA molecules can be used to interfere with expression of the marker. Typically, at least 15, 17, 19, or 21 nucleotides of the complement of marker mRNA sequence are sufficient for an antisense molecule. Typically at least 19, 21, 22, or 23 nucleotides of marker are sufficient for an RNA interference molecule. Preferably an RNA interference molecule will have a 2 nucleotide 3′overhang. If the RNA interference molecule is expressed in a cell from a construct, for example from a hairpin molecule or from an inverted repeat of the desired marker sequence, then the endogenous cellular machinery will create the overhangs. siRNA molecules can be prepared by chemical synthesis, in vitro transcription, or digestion of long dsRNA by Rnase III or Dicer. These can be introduced into cells by transfection, electroporation, or other methods known in the art. (See Hannon, G J, 2002, RNA Interference, Nature 418:244-251; Bernstein E et al., 2002, The rest is silence. RNA 7:1509-1521; Hutvagner G et al. 9 RNAi: Nature harbors a double-strand. Curr. Opin. Genetics & Development 12: 225-232, 2002, A system for stable expression of short interfering RNAs in mammalian cells. Science 296: 550-553; Lee N S, Dohjima T, Bauer G, Li H, Li M-J, Ehsani A, Salvaterra P, and Rossi J. (2002). Expression of small interfering RNAs targeted against HIV-1 rev transcripts in human cells. Nature Biotechnol. 20: 500-505; Miyagishi M, and Taira K. (2002). U6-promoter-driven siRNAs with four uridine 3′overhangs efficiently suppress targeted gene expression in mammalian cells. Nature Biotechnol. 20: 497-500; Paddison P J, Caudy A A, Bernstein E, Hannon G J, and Conklin D S. (2002). Short hairpin RNAs (shRNAs) induce sequence-specific silencing in mammalian cells. Genes & Dev. 16: 948-958; Paul C P, Good P D, Winer I, and Engelke D R. (2002). Effective expression of small interfering RNA in human cells. Nature Biotechnol. 20: 505-508; Sui G, Soohoo C, Affar E-B, Gay F, Shi Y, Forester W C, and Shi Y. (2002). A DNA vector-based RNAi technology to suppress gene expression in mammalian cells. Proc. Natl. Acad. Sci. USA 99 (6): 5515-5520; Yu J-Y, DeRuiter S L, and Turner D L. (2002). RNA interference by expression of short-interfering RNAs and hairpin RNAs in mammalian cells. Proc. Natl. Acad. Sci. USA 99 (9): 6047-6052).

[0147] In addition to known modulators, additional modulators of markers activity that are useful in the methods of the invention can be identified using two-hybrid screens, conventional biochemical approaches, and cell-based screening techniques, such as screening candidate molecules for an ability to bind to marker or screening for compounds which inhibit marker activity in cell culture.

[0148] This provides a simple in vitro assay system to screen for marker activity modulators. The method may identify agents that directly interact with and modulate the marker, as well as agents that indirectly modulate marker activity by affecting a step in the marker signal transduction pathway.

[0149] Cell-based assays employing cells which express the marker can employ cells which are isolated from mammals and which naturally express the marker. Alternatively, cells which have been genetically engineered to express the marker can be used. Preferably the genetically engineered cells are T-cells.

[0150] Agents which modulate the marker activity by modulating the marker gene expression can be identified in cell based screening assays by measuring amounts of the marker protein in the cells in the presence and absence of candidate agents. The marker protein can be detected and measured, for example, by flow cytometry using anti-marker specific monoclonal antibodies. Marker mRNA can also be detected and measured using techniques known in the art, including but not limited to Northern blot, RT-PCR, and array hybridization.

[0151] In accordance with the teachings of the invention, marker inhibitors may be administered to an organism to increase the number of T-cells in the organism. This method may be useful for treating organisms suffering from conditions resulting in a low T-cell population. Such conditions include disorders involving unwanted cellular invasion or growth, such as tumor growth or cancer. Marker inhibitors may also be useful when administered in combination with conventional therapeutics to treat T-cell proliferation sensitive disorders. For instance, a tumor, which is a T-cell proliferation sensitive disorder, is conventionally treated with a chemotherapeutic agent which functions by killing rapidly dividing cells. The marker inhibitors of the invention when administered in conjunction with a chemotherapeutic agent enhance the tumoricidal effect of the chemotherapeutic agent by stimulating T-cell proliferation to enhance the immunological rejection of the tumor cells. In accordance with the teachings of the invention, marker activators (agonists) or expression enhancers may be administered to an organism to decrease the number of T-cells, in particular tumor-infiltrating regulatory T cells, in the organism and thereby decrease deleterious T-cell activity. The methods of the invention may be applied to any organism which contains T-cells that express the marker. This includes, but is not limited to, any mammal and particularly includes humans and mice.

[0152] When methods of the invention are carried out in vivo, the effective amount of the marker modulator used will vary with the particular modulator being used, the particular condition being treated, the age and physical condition of the subject being treated, the severity of the condition, the duration of the treatment, the nature of the concurrent therapy (if any), the specific route of administration and similar factors within the knowledge and expertise of the health practitioner. For example, an effective amount can depend upon the degree to which an individual has abnormally depressed levels of T cells.

[0153] When administered, the pharmaceutical preparations of the invention are applied in pharmaceutically-acceptable amounts and in pharmaceutically-acceptably compositions. Such preparations may routinely contain salt, buffering agents, preservatives, compatible carriers, and optionally other therapeutic agents. When used in medicine, the salts should be pharmaceutically acceptable, but non-pharmaceutically acceptable salts may conveniently be used to prepare pharmaceutically-acceptable salts thereof and are not excluded from the scope of the invention. Such pharmacologically and pharmaceutically-acceptable salts include, but are not limited to those prepared from the following acids: hydrochloric, hydrobromic, sulfuric, nitric, phosphoric, maleic, acetic, salicylic, citric, formic, malonic, succinic, and the like. Also, pharmaceutically-acceptable salts can be prepared as alkaline metal or alkaline earth salts, such as sodium, potassium or calcium salts. Marker modulators may be combined, optionally, with a pharmaceutically-acceptable carrier. The term “pharmaceutically-acceptable carrier” as used herein means one or more compatible solid or liquid filler, diluents or encapsulating substances which are suitable for administration into a human. The term “carrier” denotes an organic or inorganic ingredient, natural or synthetic, with which the active ingredient is combined to facilitate the application. The components of the pharmaceutical compositions also are capable of being co-mingled with the molecules of the present invention, and with each other, in a manner such that there is no interaction which would substantially impair the desired pharmaceutical efficacy.

[0154] The pharmaceutical compositions may contain suitable buffering agents, including: acetic acid in a salt; citric acid in a salt; boric acid in a salt; and phosphoric acid in a salt. The pharmaceutical compositions also may contain, optionally, suitable preservatives, such as: benzalkonium chloride; chlorobutanol; parabens and thimerosal. Compositions suitable for parenteral administration conveniently comprise a sterile aqueous preparation of the anti-inflammatory agent, which is preferably isotonic with the blood of the recipient. This aqueous preparation may be formulated according to known methods using suitable dispersing or wetting agents and suspending agents. The sterile injectable preparation also may be a sterile injectable solution or suspension in a non-toxic parenterally-acceptable diluent or solvent, for example, as a solution in butane diol. Among the acceptable vehicles and solvents that may be employed are water, Ringer's solution, and isotonic sodium chloride solution. In addition, sterile, fixed oils are conventionally employed as a solvent or suspending medium. For this purpose any bland fixed oil may be employed including synthetic mono- or di-glycerides. In addition, fatty acids such as oleic acid may be used in the preparation of injectables. Carrier formulation suitable for oral, subcutaneous, intravenous, intramuscular, etc. administrations can be found in Remington's Pharmaceutical Sciences, Mack Publishing Co., Easton, Pa.

[0155] A variety of administration routes are available. The particular mode selected will depend, of course, upon the particular drug selected, the severity of the condition being treated and the dosage required for therapeutic efficacy. The methods of the invention, generally speaking, may be practiced using any mode of administration that is medically acceptable, meaning any mode that produces effective levels of the active compounds without causing clinically unacceptable adverse effects. Such modes of administration include oral, rectal, topical, nasal, interdermal, or parenteral routes. The term “parenteral” includes subcutaneous, intravenous, intramuscular, or infusion. Intravenous or intramuscular routes are not particularly suitable for long-term therapy and prophylaxis. They could, however, be preferred in emergency situations. Oral administration will be preferred because of the convenience to the patient as well as the dosing schedule. The pharmaceutical compositions may conveniently be presented in unit dosage form and may be prepared by any of the methods well-known in the art of pharmacy. All methods include the step of bringing the active agent into association with a carrier which constitutes one or more accessory ingredients. In general, the compositions are prepared by uniformly and intimately bringing the active agent into association with a liquid carrier, a finely divided solid carrier, or both, and then, if necessary, shaping the product. Compositions suitable for oral administration may be presented as discrete units, such as capsules, tablets, lozenges, each containing a predetermined amount of the active agent. Other compositions include suspensions in aqueous liquids or non-aqueous liquids such as a syrup, elixir or an emulsion.

[0156] Other delivery systems can include time-release, delayed release or sustained release delivery systems. Such systems can avoid repeated administrations of the active agent, increasing convenience to the subject and the physician. Many types of release delivery systems are available and known to those of ordinary skill in the art. They include polymer base systems such as poly (lactide-glycolide), copolyoxalates, polycaprolactones, polyesteramides, polyorthoesters, polyhydroxybutyric acid, and polyanhydrides. Microcapsules of the foregoing polymers containing drugs are described in, for example, U.S. Pat. No. 5,075,109. Delivery systems also include non-polymer systems that are: lipids including sterols such as cholesterol, cholesterol esters and fatty acids or neutral fats such as mono-di- and tri-glycerides; hydrogel release systems; sylastic systems; peptide based systems; wax coatings; compressed tablets using conventional binders and excipients; partially fused implants; and the like. Specific examples include, but are not limited to: (a) erosional systems in which the anti-inflammatory agent is contained in a form within a matrix such as those described in U.S. Pat. Nos. 4,452,775, 4,667,014, 4,748,034 and 5,239,660 and (b) diffusional systems in which an active component permeates at a controlled rate from a polymer such as described in U.S. Pat. Nos. 3,832,253, and 3,854,480. In addition, pump-based hardware delivery systems can be used, some of which are adapted for implantation. Use of a long-term sustained release implant may be particularly suitable for treatment of chronic conditions. Long-term release, are used herein, means that the implant is constructed and arranged to deliver therapeutic levels of the active ingredient for at least 30 days, and preferably 60 days. Long-term sustained release implants are well-known to those of ordinary skill in the art and include some of the release systems described above. While the invention has been described with respect to specific examples including presently preferred modes of carrying out the invention, those skilled in the art will appreciate that there are numerous variations and permutations of the above described systems and techniques that fall within the spirit and scope of the invention as set forth in the appended claims.

[0157] The invention will be illustrated by means of non-limiting examples in reference to the following figures.

[0158] FIG. 1. Purification, functional characterization and expression of immune checkpoints in tumor infiltrating cells.

[0159] (A) Representation of the sorting strategy of Treg cells infiltrating tumor or normal tissue.

[0160] (B) Representative flow cytometry plots showing suppressive activity of Treg cells isolated from tumor (NSCLC or CRC), normal lung and blood of the same patient. 4×10⁵ carboxyfluorescein diacetate succinimidyl ester (CFSE)-labeled CD4+ naïve T cells from healthy donors were cocultured with an equal number of Treg cells for 4 days with a CD3-specific mAb and CD1c+CD11c+ dendritic cells. Percentage of proliferating cells are indicated. Data are representative of three independent experiments.

[0161] (C) Z-score normalized RNA-seq expression values of immune checkpoints genes are represented as a heatmap. Cell populations are reported in the upper part of the graph, while gene names have been assigned to heatmap rows. Hierarchical clustering results are shown as a dendrogram drawn on the left side of the matrix. Colon tissues are indicated as C, lung tissues as L and peripheral blood as B. See also FIG. 6.

[0162] FIG. 2. Differential expression analysis identifies co-regulated genes in tumor infiltrating Treg cells

[0163] Z-score normalized expression values of genes that are preferentially expressed in tumor-infiltrating Tregs (Wilcoxon Mann Whitney test p<2.2×10-16) over the listed cell subsets are represented as boxed plots. Colon tissues are indicated as C, lung tissues as L and peripheral blood as B.

[0164] FIG. 3. Single cell analysis of tumor infiltrating Treg cells

[0165] (A) Schematic representation of the experimental workflow. Experiments were performed on Treg cells infiltrating CRC, NSCLC, or isolated from peripheral blood of healthy donors (PB); five samples were collected for each tissue.

[0166] (B) Percentage of co-expression of signature genes with FOXP3 and IL2RA is depicted.

[0167] (C) Expression levels of the signature genes classified by the percentage of co-expression are represented as box plot.

[0168] (D) Expression distribution (violin plots) in Treg cells infiltrating CRC, NSCLC or PB. Plots representing the ontology classes of receptors, signaling and enzymatic activity, cytokine activity and transcription factors are shown (Wilcoxon Mann Whitney test p<0.05). Gray scale gradient indicates the percentage of cells expressing each gene in Treg cells isolated from the three compartments.

[0169] (E) Gene expression analysis of tumor Treg signature genes in different tumor types. Expression values are expressed as log 2 (2\hat{ }-DCt).

[0170] FIG. 4. Expression of tumor-infiltrating Treg cells protein signatures in CRC and NSCLC samples.

[0171] (A and B) Representative flow cytometry plots for tumor normal tissue infiltrating Treg cells and peripheral blood Treg cells analyzed for the expression of the indicated proteins.

[0172] FIG. 5. Prognostic value of signature transcripts of tumor infiltrating Treg cells.

[0173] (A) Kaplan-Meier survival curve comparing the high and low expression of the tumor Treg signature transcripts (CCR8, MAGEH1, LAYN) normalized to the CD3G for the CRC (n=177) and NSCLC (n=263) studies. Univariate analysis confirmed a significant difference in overall survival curve comparing patients with high and low expression. Statistical significance was determined by the log-rank test. (CRC: p=0.05 for CCR8, p=1.48×10-3 for MAGEH1, p=2.1×10-4 for LAYN; NSCLC: p=0.0125 for CCR8, p=0.035 for MAGEH1, p=0.0131 for LAYN) Each table depicts the Kaplan Meier estimates at the specified time points. (B) Expression distributions of CCR8, MAGEH1 and LAYN according to tumor staging at the time of surgery in the cohort of CRC patients. See also FIG. 9.

[0174] FIG. 6 related to FIG. 1. Transcriptome analysis of tumor infiltrating lymphocytes.

[0175] (A) Representation of the sorting strategy of Treg cells infiltrating colorectal tumor or normal tissue.

[0176] (B) RNA-seq expression values (normalized counts) of FOXP3, TBX21 and RORC in CD4+ Th1, Th17 and Treg cells from CRC (C), NSCLC (L) or peripheral blood (PB) of healthy donors.

[0177] (C) RNA-seq normalized counts data for selected immune checkpoints and their ligands are shown as histogram plot. Cell population names are reported in the lower part of each graph, while gene names are shown in the upper part.

[0178] FIG. 7 related to FIG. 3. Single-cell analysis of tumor infiltrating Treg cells.

[0179] Assessment of CD4+ Treg, Th1, Th17, Th2, CD8+ T cells and B cell markers expression (percentage of expressing cells) in single Treg cells purified from NSCLC and CRC.

[0180] FIG. 8 related to FIG. 4. Comparison of BATF expression in CD4+ Treg vs Th17 cells.

[0181] BATF expression levels (RNA-seq normalized counts data) in CD4+ Treg and Th17 subsets isolated from tumor tissue or peripheral blood

[0182] FIG. 9 related to FIG. 5. Expression levels of tumour-infiltrating Treg signature genes.

[0183] RNA-seq normalized counts data of three tumour-infiltrating Treg signature genes (MAGEH1 (panel A), LAYN (panel B) and CCR8 (panel C)) across listed cell populations.

[0184] FIG. 10. Results of RT-PCR analysis done on cDNA from Tumor infiltrating Treg cells (L=NSCLC, C=CRC, −=ntc) with specific primers able to discriminate the different transcript isoforms annotated for SIRPG.

### DETAILED DESCRIPTION OF THE INVENTION

[0185] Experimental Procedures

[0186] Human Primary Tissues

[0187] Primary human lung or colorectal tumors and non-neoplastic counterparts were obtained respectively from fifteen and fourteen patients who underwent surgery for therapeutic purposes at Fondazione IRCCS Ca' Granda, Policlinico or San Gerardo Hospitals (Italy). Records were available for all cases and included patients' age at diagnosis, gender, smoking habit (for lung cancer patients), clinicopathological staging (Sobin et al., 2009), tumor histotype and grade (Table II). No patient received palliative surgery or neoadjuvant chemo- and/or radiotherapy. Informed consent was obtained from all patients, and the study was approved by the Institutional Review Board of the Fondazione IRCCS Ca' Granda (approval n. 30/2014).

[0188] Non-small-cell lung cancer (NSCLC) were cut into pieces and single-cell suspensions were prepared by using the Tumor Dissociation Kit, human and the gentleMACS™ Dissociator (Miltenyi Biotech cat. 130-095-929) according to the accompanying standard protocol. Cell suspensions were than isolated by ficoll-hypaque density-gradient centrifugation (Amersham Bioscience). Colorectal cancer (CRC) specimens were cut into pieces and incubated in DTT 0.1 mM (Sigma-Aldrich) for 10 min, then extensively washed in HBSS (Thermo Scientific) and incubated in 1 mM EDTA (Sigma-Aldrich) for 50 min at 37° C. in the presence of 5% CO2. They were then washed and incubated in type D collagenase solution 0.5 mg/mL (Roche Diagnostic) for 4 h at 37° C. Supernatants containing tumor infiltrating lymphocytes were filtered through 100 μm cell strainer, centrifuged and fractionated 1800×g for 30 min at 4° C. on a four-step gradient consisting of 100%, 60%, and 40% and 30% Percoll solutions (Pharmacia). The T cell fraction was recovered from the inter-face between the 60% and 40% Percoll layers.

[0189] CD4 T cell subsets were purified by FACS sorting using the following fluorochrome conjugated antibodies: anti-CD4 APC/Cy7 (Biolegend clone OKT4), anti-CD27 Pacific Blue (Biolegend, clone M-T271), anti-IL7R PE (Milteniy, clone MB15-18C9), anti-CD25 PE/Cy7 (eBioscience, clone BC96), anti-CXCR3 PE/Cy5 (BD, clone 1C6/CXCR3), anti-CCR6 APC (Biolegend, clone G034E3) and anti-CCRS FITC (Biolegend, clone j418F1) using a FACSAria II (BD).

[0190] Flow Cytometry

[0191] To validate surface marker expression cells were directly stained with the following fluorochrome-conjugated antibodies and analyzed by flow cytometry: anti-CD4 (Biolegend, clone OKT4); anti-PD-L2 (Biolegend, Clone CL24F.10C12); anti-CD127 (eBioscience, clone RDR5); anti-BATF (eBioscience, clone MBM7C7), anti-GITR (eBioscience, clone eBIOAITR), anti-CD25 (Miltenyi, clone 4E3) and anti 4-1BB (eBioscience clone 4B4) anti CCR8 (Biolegend clone L263G8) anti CD30 (eBioscience, clone Ber-H2) anti PD-L1 (Biolegend clone 29E.2A3) anti TIGIT (eBioscience, clone MBSA43) anti IL1R2 (R and D clone 34141) IL21R (Biolegend clone 2G1-K12) anti OX40 (Biolegend clone Ber-ACT35). Intracellular staining was performed using eBioscience Foxp3 staining kit according to the manufactured's protocol (eBioscience cat 00-5523-00). Briefly cells were harvested and fixed for 30 min in fixation/permeabilization buffer at 4° C., and than stained with anti-FOXP3 antibody (eBioscience, clone 236A/E7) and anti-BATF (eBioscience clone MBM7C7) in permeabilisation buffer for 30 min at 4° C. Cells were then washed two times, resuspended in FACS washing buffer and analyzed by flow cytometry.

[0192] Suppression Assay.

[0193] 4×10⁴ carboxyfluorescein diacetate succinimidyl ester (CFSE)-labeled (1 μM) responders Naive⁺ T cells from healthy donors were cocultured with different E/T ratio with unlabeled CD127⁻CD25^{low}CD4⁺ T cells sorted from TILs or PBMCs of patients with CRC or NSCLC, using FACS Aria II (BD Biosciences), in the presence of CD11c⁺CD1c⁺ dendritic cells as antigen-presenting cells and 0.5 mg/ml anti-CD3 (OKT3) mAb. Proliferation of CFSE-labeled cells was assessed by flow cytometry after 96 hr culture.

[0194] RNA Isolation and RNA Sequencing

[0195] RNA from tumor-infiltrating lymphocytes was isolated using mirVana Isolation Kit. Residual contaminating genomic DNA was removed from the total RNA fraction using Turbo DNA-free (Thermo Fisher). The RNA yields were quantified using the QuantiFluor RNA System (Promega) and the RNA quality was assessed by the Agilent 2100 Bioanalyzer (Agilent). Libraries for Illumina sequencing were constructed from 50 ng of total RNA with the Illumina TruSeq RNA Sample Preparation Kit v2 (Set A). The generated libraries were loaded on to the cBot (Illumina) for clustering on a HiSeq Flow Cell v3. The flow cell was then sequenced using a HiSeq 2500 in High Output mode (Illumina). A paired-end (2×125) run was performed.

[0196] RNA-Seq Data Analysis

[0197] Raw .fastq files were analyzed using FastQC v0.11.3, and adapter removal was performed using cutadapt 1.8. Cutadapt is run both for reverse and forward sequences with default parameters [—anywhere <adapter1>—anywhere <adapter2>—overlap 10—times 2—mask-adapter]. Adapter sequences used for libraries preparation are

Adapter1:
(SEQ ID NO: 710)
AGATCGGAAGAGCACACGTCTGAACTCCAGTCACNNNNNNATCTCGTA
TGCCGTCTTCTGCTTG
Adapter2:
(SEQ ID NO: 711)
AGATCGGAAGAGCGTCGTGTAGGGAAAGAGTGTAGATCTCGGTGGTCG
CCGTATCATT

[0198] Trimming was performed on raw reads using Trimmomatic (Bolger et al., 2014): standard parameters for phred33 encoding were used: ILLUMINACLIP (LEADING:3 TRAILING:3 SLIDINGWINDOW:4:15), MINLEN parameter was set to 50.

[0199] Mapping and quantification: reads mapping to the reference genome (GRCh38) was performed on quality-checked and trimmed reads using STAR 2.4.1c: [STAR—genomeDir <index_star>—runThreadN <cpu_number>—readFilesIn <trimmed>_R1.fastq.gz <trimmed>_R2_P.fastq.gz—readFilesCommand zcat]. The reference annotation is Ensembl v80. The overlap of reads with annotation features found in the reference .gtf was calculated using HT-seq v0.6.1. The output computed for each sample (raw read counts) was then used as input for DESeq2 analysis. Raw counts were normalized using DESeq2's function ‘r log’, and normalized counts were used to perform and visualize Principal Component Analysis (PCA) results (using DESeq2's ‘plotPCA’ function).

[0200] Differential expression analysis: differential expression analyses of tumor-infiltrating CD4+ Treg/Th1/Th17 subsets vs. CD4+ Treg/Th1/Th17 from PBMC were performed using DESeq2. Upregulated/downregulated genes were selected for subsequent analyses if their expression values were found to exceed the threshold of 0.05 FDR (Benjamini-Hochberg correction).

[0201] Capturing of Single Cells, Preparation of cDNA and Single-Cell PCR

[0202] Treg cells from 5 CRC and 5 NSCLC specimens were isolated as previously described (See also Table II). Single cells were captured on a microfluidic chip on the C1 System (Fluidigm) and whole-transcriptome amplified. cDNA was prepared on chip using the SMARTer Ultra Low RNA kit (Clontech). Cells were loaded onto the chip at a concentration of 3-5E5 cells/ml, stained for viability (LIVE/DEAD cell viability assay; Thermo Fisher) and imaged by phase-contrast and fluorescence microscopy to assess the number and viability of cells per capture site. Only single, live cells were included in the analysis. For qPCR experiments, harvested cDNA was pre-amplified using a 0.2× pool of primers prepared from the same gene expression assays to be used for qPCR. Pre-amplification allows for multiplex sequence-specific amplification 78 targets. In detail, a 1.25 μl aliquot of single cell cDNA was pre-amplified in a final volume of 5 μl using 1 μl of PreAmp Master Mix (Fluidigm) and 1.25 μl pooled TaqMan assay mix (0.2×). cDNA went through amplification by denaturing at 95° C. for 15 s, and annealing and amplification at 60° C. for 4 min for 20 cycles. After cycling, pre-amplified cDNA was diluted 1:5 by adding 20 μl TE Buffer to the final 5 μl reaction volume for a total volume of 25 μl.

[0203] Single-cell gene expression experiments were performed using the 96×96 quantitative PCR (qPCR) DynamicArray microfluidic chips (Fluidigm). A 2.25 μl aliquot of amplified cDNA was mixed with 2.5 μl of TaqMan Fast Advanced Master Mix (Thermo Fisher) and 0.25 μl of Fluidigm's “sample loading agent,” then inserted into one of the chip “sample” inlets. A 2.5 μl aliquot of each 20× TaqMan assay was mixed with 2.5 μl of Fluidigm's “assay loading agent” and individually inserted into one of the chip “assay” inlets. Samples and probes were loaded into 96×96 chips using an IFC Controller HX (Fluidigm), then transferred to a BioMark real-time PCR reader (Fluidigm) following manufacturer's instructions. A list of the 78 TaqMan assays used in this study is provided below.

TABLE V
Related to FIG. 3.
List of TaqMan Probes and assay number
used in RT-qPCR single-cell experiments
Taqman Assays Numbers

| Gene Name | Assay Number | Gene Number | Assay Number |
|---|---|---|---|
| BCL2L1 | Hs00236329_ml | ACP5 | Hs00356261_ml |
| EOS | Hs00223842_ml | BATF | Hs00232390_ml |
| AHCYL1 | Hs00198312_ml | SLC35F2 | Hs00213850_ml |
| NFE2L3 | Hs00852569_gl | LAX1 | Hs00214948_ml |
| IL12RB2 | Hs00155486_ml | CCR8 | Hs00174764_ml |
| CD177 | Hs00360669_ml | ADPRH | Hs00153890_ml |
| OX40 | Hs00937194_gl | IKZF2 | Hs00212361_ml |
| METTL7A | Hs00204042_ml | CSF2RB | Hs00166144_ml |
| ENTPD1 | Hs00969559_ml | NDFIP2 | Hs00324851_ml |
| NFAT5 | Hs00232437_ml | CADM1 | Hs00942508_ml |
| CTSC | Hs00175188_ml | ICOS | Hs00359999_ml |
| SSH1 | Hs00368014_ml | COL9A2 | Hs00156712_ml |
| TMEM184C | Hs00217311_ml | LTA | Hs00236874_ml |
| HTATIP2 | Hs01091727_ml | MAGEH1 | Hs00371974_sl |
| HSDL2 | Hs00953689_ml | IL21R | Hs00222310_ml |
| FOXP3 | Hs01085834_ml | SSTR3 | Hs01066399_ml |
| IL2RA | Hs00907778_ml | RNF145 | Hs01099642_ml |
| LIMA1 | Hs01035646_ml | LAPTM4B | Hs00363282_ml |
| NAB1 | Hs00428619_ml | GRSF1 | Hs00909877_ml |
| ACSL4 | Hs00244871_ml | ANKRD10 | Hs00214321_ml |
| ERI1 | Hs00405251_ml | NPTN | Hs01033353_ml |
| FKBP1A | Hs00356621_gl | HS3ST3B1 | Hs00797512_sl |
| LEPROT | Hs00956627_sl | TRAF3 | Hs00936781_ml |
| NETO2 | Hs00983152_ml | RRAGB | Hs01099767_ml |
| VDR | Hs00172113_ml | ZBTB38 | Hs00257315_sl |
| CSF1 | Hs00174164_ml | TIGIT | Hs00545087_ml |
| GITR | Hs00188346_ml | TFRC | Hs00951083_ml |
| IL1R2 | Hs01030384_ml | JAK1 | Hs01026983_ml |
| IL1R1 | Hs00991010_ml | KSR1 | Hs00300134_ml |
| LAYN | Hs00379511_ml | ZNF282 | Hs00411965_ml |
| THADA | Hs00736554_ml | PTPRJ | Hs01119326_ml |
| CTLA4 | Hs00175480_ml | CHRNA6 | Hs02563509_sl |
| CHST2 | Hs01921028_sl | IL2RB | Hs01081697_ml |
| CHST7 | Hs00219871_ml | TBX21 | Hs00203436_ml |
| LRBA | Hs01032231_ml | RORC | Hs01076112_ml |
| ETV7 | Hs00903229_ml | CXCR5 | Hs00540548_sl |
| LY75 | Hs00982383_ml | CD8A | Hs00233520_ml |
| ADAT2 | Hs00699339_ml | CD8B | Hs00174762_ml |
| GCNT1 | Hs00155243_ml | PTGDR2 | Hs00173717_ml |
| CASP1 | Hs00354836_ml | CD19 | Hs01047410_gl |

[0204] Single-Cell Data Analysis:

[0205] The Quality Threshold in the BioMark™ Analysis software is a qualitative tool designed to measure the “quality” of each amplification curve. Basically, each amplification curve is compared to an ideal exponential curve and as the quality score approaches 1 the closer it is to ideal. The further the curve is from ideal, its quality score approaches 0. The default cutoff of 0.65 is an arbitrary value set by Fluidigm. Any curve above 0.65 passes. Any curve below, fails. Baseline correction was set on Linear (Derivative)[default]. Ct Threshold Method was set on Auto (Detectors). This method independently calculates a threshold for each detector on a chip. For clustering and downstream analysis, raw Cts have been converted to Log 2Exp by using a Limit of Detection (LOD) of 35, which corresponds to the last PCR cycle. Co-expression analysis has been performed by considering both CRC and NSCLC samples on those genes for which both FOXP3 and IL2RA were co-expressed at least to 2%. Gene's levels above the background were depicted as violin plots after log 2 scale transformation by ggplot2 (v. 2.1.10). The violin color gradient is the percentage of cells that are expressing the gene of interest and the upper bound of the color scale is the maximum percentage of cells that express a gene of the whole geneset.

[0206] Procedure for the Removal of Transcripts Whose Expression Values are Affected by the ‘Dropout’ Effect.

[0207] Single-cell qPCR data are inherently noisy, and due the limitations of current technologies the expression patterns of a certain number of genes may be affected by the ‘dropout effect’. Inventors performed a gene selection procedure in order to take into account this ‘dropout’ effect and discard those genes whose expression values cannot be reliably used in a binary comparison (tumor-peripheral vs blood). Inventors fitted a number of parametric distributions to the ratios of detected genes on the total number of tumor cells (both NSCLC and CRC) and selected the reciprocal inverse Gaussian continuous random variable as best fit.

[0208] Inventors then calculated the median value of the fitted distribution and discarded those genes whose detection ratio is less than this threshold value (at least 8.4% of detection). Inventors reasoned that these genes are more likely to be affected by the ‘dropout’ effect. With this threshold inventors selected 45 genes for which a non-parametric T-test (Wilcoxon Mann Whitney test p<0.05) has been performed (by comparing tumor vs. peripheral blood samples).

[0209] Meta Analysis Kaplan-Meier and Stage Correlation

[0210] Statistical analysis was performed by using the R survival package (Therneau T. 2013). Survival times were calculated as the number of days from initial pathological diagnosis to death, or the number of days from initial pathological diagnosis to the last time the patient was reported to be alive. The Kaplan-Meier (KM) was used to compare the high and low expression levels of the tumor-Treg cell signature transcripts in either CRC (GSE17536) and NSCLC (GSE41271) patients. For both studies annotation was normalized to four tumor stages (1, 2, 3, 4). For study GSE41271 five patients were excluded due to incomplete or inaccurate annotation (GSM1012883, GSM1012884, GSM1012885, GSM1013100, GSM1012888), retaining a total of two hundred and sixty three patients. Patients from both studies were labeled as ‘High’ ‘Low’ whether or not their relative expression values exceeded a decision boundary (mean of the samples). Inventors define \ddot{x}ᵢⱼ to denote the relative expression of the gene i for the n samples of the study normalized to the CD3 level:

$${\ddot{x}}_{i , j} = \frac{{x}_{i , j}}{{x}_{CD 3 G , j}} :$$

i=(CCR8,MAGEH1,LAYN) j=1, 2, . . . n samples

[0211] To classify a patient, a threshold on the is required and defined as

$${T}_{( Upper , Lower )} = median ( {\ddot{x}}_{i , j} ) \pm \frac{σ ( {\ddot{x}}_{i , j} )}{10}$$

[0212] where T_{(Upper,Lower)} represent the upper and lower extreme of the decision boundary:

$$\{ \begin{matrix}{\ddot{x}}_{i , j} > {T}_{Upper} High \\ {\ddot{x}}_{i , j} < {T}_{Lower} Low \\ {T}_{Upper} \leq {\ddot{x}}_{i , j} \leq {T}_{Lower} excluded\end{matrix}$$

[0213] Inventors examined the prognostic significance of tumor Treg cells transcripts by using log-rank statistics; a p-value of less than 0.05 was considered statistically significant. Since the log-rank test resulted in a p-value of less than 0.05, a post stage comparison by means of box plot representation was performed in order to evaluate the correlation degree between the expression level of the transcripts and tumor stages in the cohort of CRC patients. The annotation was normalized to four tumor stages (1, 2, 3, 4).

[0214] Accession Numbers

[0215] The accession numbers for the present data are as follows: ENA: PRJEB11844 for RNA-seq tumor and tissue infiltrating lymphocytes; ArrayExpress: E-MTAB-2319 for RNA-seq human lymphocytes datasets; ArrayExpress: E-MTAB-513 for Illumina Human BodyMap 2.0 project; GEO: GSE50760 for RNA-seq datasets CRC; GEO: GSE40419 for RNA-seq datasets NSCLC; GEO: GSE17536 for CRC expression profiling by array; and GEO: GSE41271 for NSCLC expression profiling by array.

[0216] Prediction of Surface-Exposed and Membrane-Associated Proteins

[0217] The probability of surface exposure of the proteins encoded by the genes of interest was determined by a combination of four different cell localization prediction algorithms: Yloc (Briesemeister et al, 2010), TMHMM (http://www.cbs.dtu.dk/services/TMHMM/), SignalP (http://www.cbs.dtu.dk/services/SignalP/) and Phobius (Käll et. al, 2007). In particular Yloc is a interpretable system offering multiple predictive models in animal version; inventors used both YLoc-LowRes predicting into 4 location (nucleus, cytoplasm, mitochondrion, secretory pathway) and Yloc-HighRes predicting into 9 locations (extracellular space, plasma membrane, nucleus, cytoplasm, mitochondrion, endoplasmic reticulum, peroxisome, Golgi apparatus, and lysosome).

[0218] TMHMM and SignalP were developed by the bioinformatic unit of the technical University of Denmark for the prediction of transmembrane helices and the presence and location of signal peptide cleavage sites in amino acid sequences, respectively. Phobius is a combined transmembrane topology and signal peptide predictor.

[0219] RT-PCR Analysis of Transcript Isoforms Expressed by Tumor-Infiltrating Regulatory T Cells (Treg Cells)

[0220] Total RNA was extracted from tumor Treg cells (NSCLC or CRC) using miRCURY RNA isolation kit (Exiqon) and 1 μg was reverse transcribed with iScript reverse transcription supermix (BIORAD). Afterwards, 25 ng of cDNA were amplified with DreamTaq Green PCR Master Mix (ThermoScientific) using multiple gene-specific primers able to discriminate the different isoforms. PCR products were run on agarose gel. The expression of specific transcripts was assessed based on the expected band size.

[0221] Results

[0222] Tumor Infiltrating Tregs Cells Upregulate Immune Checkpoints and are Highly Suppressive

[0223] To assess the gene expression landscape of tumor infiltrating CD4⁺ T cells, the inventors isolated different CD4⁺ lymphocytes subsets from two different tumors, NSCLC and CRC, from the adjacent normal tissues, and from peripheral blood samples. From all these tissues, the inventors purified by flow cytometry (FIGS. 1A and 6A and 6B) CD4⁺ Treg (36 samples from 18 individuals), Th1 (30 samples from 21 individuals) and Th17 (22 samples from 14 individuals) cells (Table I and Table II).

TABLE 1
Purification and RNA-Sequencing of
Human Primary Lymphocyte Subsets

| | | Sorting | Number of | Mapped |
|---|---|---|---|---|
| Tissue | Subset | Phenotype | Samples | Reads (M) |
| NSCLC | CD4+ Treg | CD4⁺ CD127⁻ | 8 | 587 |
| | | CD25⁺ | | |
| | CD4⁺ Th1 | CD4⁺ CXCR3⁺ | 8 | 409 |
| | | CCR6⁻ | | |
| | CD4⁺ Th17 | CD4⁺ CCR6⁺ | 6 | 206 |
| | | CXCR3⁻ | | |
| CRC | CD4⁺ Treg | CD4⁺ CD127⁻ | 7 | 488 |
| | | CD25⁺ | | |
| | CD4⁺ Th1 | CD4⁺ CXCR3⁺ | 5 | 266 |
| | | CCR6⁻ | | |
| | CD4⁺ Th17 | CD4⁺ CCR6⁺ | 5 | 308 |
| | | CXCR3⁻ | | |
| Lung | CD4⁺ Treg | CD4⁺ CD127⁻ | 1 (pool | 73 |
| (normal tissue) | | CD25⁺ | of 6) | |
| | CD4⁺ Th1 | CD4⁺ CXCR3⁺ | 1 (pool | 76 |
| | | CCR6⁻ | of 6) | |
| Colon | CD4⁺ Treg | CD4⁺ CD127⁻ | 7 | 404 |
| (normal tissue) | | CD25⁺ | | |
| | CD4⁺ Th1 | CD4⁺ CXCR3⁺ | 6 | 352 |
| | | CCR6⁻ | | |
| | CD4⁺ Th17 | CD4⁺ CCR6⁺ | 6 | 284 |
| | | CXCR3⁻ | | |
| PB | CD4⁺ Treg | CD4⁺ CD127⁻ | 8 | 259 |
| (healthy donor) | | CD25⁺ | | |
| | CD4⁺ Th1 | CD4⁺ CXCR3⁺ | 5 | 70 |
| | | CCR6⁻ | | |
| | CD4⁺ Th17 | CD4⁺ CCR6⁺ | 5 | 77 |
| | | CXCR3⁻ | | |

For each cell subsets profiled by RNA-sequencing tissue of origin, surface marker combinations used for sorting, number of profited samples, as well as number of mapped sequencing reads are indicated. M, million; CRC, colorectal cancer; NSCLC, non-small cell lung cancer, PB, peripheral blood.

TABLE II
related to Table I. Patients information and histological analysis.
For each cell subset profiled by RNA-sequencing, patient records are shown
including: age at diagnosis, gender, smoking habit (for lung cancer patients),
clinicopathological staging (TNM classification) tumor histotype and grade.
For Treg cell isolated for qPCR experiment the same information are available,
including also the number of live cells captured from each
tumor and available for single-cell analysis.
CRC: colorectal cancer; NSCLC: non-small cell lung cancer; (T):
Tumor Sample; (H): Healthy Tissue; ADC: Adenocarcinoma; SCC:
Squamous Cell Carcinoma; MUC ADC: Mucinous Adenocarcinoma.

| NSCLC | | | | | | | | |
|---|---|---|---|---|---|---|---|---|
| PATIENTS | | | | | | | | |
| LIST (RNA | | | | | | | | |
| SEQUENCING) | (T)Th1 | (T)Th17 | (T)Treg | (H)Th1 | (H)Th17 | (H)Treg | SMOKE HABIT | STATUS |
| PATIENT1 | | | SQ_0342 | | | | PREVIOUS SMOKER > 15 y | ALIVE |
| PATIENT2 | | | SQ_0339 | | | | PREVIOUS SMOKER < 15 y | ALIVE |
| PATIENT3 | SQ_0365 | SQ_0375 | | | | | PREVIOUS SMOKER < 15 y | ALIVE |
| PATIENT4 | SQ_0366 | SQ_0374 | SQ_0341 | | | | PREVIOUS SMOKER > 15 y | ALIVE |
| PATIENT5 | SQ_0364 | SQ_0373 | | SQ_0350 | | SQ_0351 | SMOKER | DEAD |
| PATIENT6 | SQ_0358 | | SQ_0336 | SQ_0350 | | SQ_0351 | PREVIOUS SMOKER < 15 y | ALIVE |
| PATIENT7 | SQ_0363 | SQ_0376 | SQ_0334 | SQ_0350 | | SQ_0351 | PREVIOUS SMOKER < 15 y | ALIVE |
| PATIENT8 | SQ_0357 | | SQ_0337 | SQ_0350 | | SQ_0351 | PREVIOUS SMOKER < 15 y | ALIVE WITH |
| | | | | | | | | RELAPSE |
| PATIENT9 | SQ_0404 | SQ_0408 | SQ_0398 | SQ_0350 | | SQ_0351 | SMOKER | ALIVE |
| PATIENT10 | SQ_0403 | SQ_0407 | SQ_0396 | SQ_0350 | | SQ_0351 | PREVIOUS SMOKER > 15 y | ALIVE |

| NSCLC | | | | | | | | | |
|---|---|---|---|---|---|---|---|---|---|
| PATIENTS | | | | | | | | | |
| LIST (RNA | | | HISTOTYPE | ADCA SUBTYPE | | | | | |
| SEQUENCING) | GENDER | AGE(y) | MAJOR | (PREDOMINANT) | GRADE | pTNM:T | pTNM:N | pTNM:M | STAGE |
| PATIENT1 | M | 84 | SCC | | G3 | 2b | 0 | 0 | IIA |
| PATIENT2 | M | 83 | SCC | | G3 | 2a | 0 | 0 | IB |
| PATIENT3 | M | 72 | SCC | | G3 | 2 | 2 | 0 | IIIA |
| PATIENT4 | M | 79 | SCC | | G3 | 2a | 0 | 0 | IB |
| PATIENT5 | M | 66 | SCC | | G3 | 3 | 2 | 0 | IIIA |
| PATIENT6 | M | 71 | SCC | | G3 | 4 | 1 | 0 | IIIA |
| PATIENT7 | M | 78 | SCC | | G3 | 2b | 1 | 0 | IB |
| PATIENT8 | M | 77 | ADCA | SOLID | G3 | 2 | 2 | 0 | IIIA |
| PATIENT9 | F | 69 | ADCA | SOLID | G3 | 1a | 0 | 0 | IA |
| PATIENT10 | F | 77 | ADCA | AC NAR | G3 | 1a | 0 | 0 | IA |

NSLC = Non Small Cell Lung Cancer
ADC = Adenocarcinoma
SCC = Squamous Cell Carcinoma
(T) = Tumor Sample
(H) = HealthyTissue

| TUMOR | | | | | | |
|---|---|---|---|---|---|---|
| INFILTRATING | | | | | | |
| TREG FROM | | | | | HISTOTY | |
| NSCLC (SINGLE | | | | | PE | ADCA SUBTYPE |
| CELL qPCR | SMOKE HABIT | STATUS | GENDER | AGE(y) | MAJOR | (PREDOMINANT) |
| PATIENT1 | NEVER | ALIVE | F | 65 | ADCA | ACINAR and |
| | SMOKER | | | | | PAPILLARY |
| PATIENT2 | PREVIOUS | ALIVE | M | 62 | ADCA | SOLID |
| | SMOKER < 15 y | | | | | |
| PATIENT3 | NEVER | ALIVE | F | 63 | ADCA | ACINAR |
| | SMOKER | | | | | |
| PATIENT4 | SMOKER | ALIVE | M | 66 | SCC | |
| PATIENT5 | SMOKER | ALIVE | M | 68 | SCC | |

| TUMOR | | | | | | |
|---|---|---|---|---|---|---|
| INFILTRATING | | | | | | |
| TREG FROM | | | | | | CAPTURED |
| NSCLC (SINGLE | | | | | | SINGLE |
| CELL qPCR | GRADE | pTNM:T | pTNM:N | pTNM:M | STAGE | CELLS |
| PATIENT1 | G2 | 2a | 0 | 0 | IB | 71 |
| PATIENT2 | G2 | 1b | 0 | 0 | IA | 61 |
| PATIENT3 | G1 | 1a | 0 | 0 | IA | 44 |
| PATIENT4 | G2 | 2a | 0 | 0 | IB | 55 |
| PATIENT5 | G3 | 1b | 0 | 0 | IA | 55 |

NSLC = Non Small Cell Lung Cancer
ADC = Adenocarcinoma
SCC = Squamous Cell Carcinoma
(T) = Tumor Sample
(H) = HealthyTissue

| CRC | | | | | | | | |
|---|---|---|---|---|---|---|---|---|
| PATIENTS | | | | | | | | |
| LIST (RNA | | | | | | | | |
| SEQUENCING) | (T) Th1 | (T) Th17 | (T) Treg | (H) Th1 | (H) Th17 | (H) Treg | GENDER | AGE(y) |
| PATIENT1 | | | SQ_0389 | SQ_0386 | SQ_0387 | SQ_0388 | M | 76 |
| PATIENT2 | SQ_0427 | SQ_0434 | | | | SQ_0418 | F | 68 |
| PATIENT3 | SQ_0423 | SQ_0436 | SQ_0411 | | | | M | 80 |
| PATIENT4 | SQ_0426 | SQ_0437 | SQ_0413 | SQ_0428 | SQ_0439 | SQ_0417 | M | 79 |
| PATIENT5 | SQ_0425 | | SQ_0412 | SQ_0429 | SQ_0441 | SQ_0422 | M | 78 |
| PATIENT6 | SQ_0424 | | SQ_0415 | SQ_0431 | SQ_0442 | SQ_0421 | M | 69 |
| PATIENT7 | | SQ_0435 | SQ_0416 | SQ_0432 | SQ_0438 | SQ_0420 | F | 84 |
| PATIENT8 | | | SQ_0414 | | | | F | 75 |
| PATIENT9 | | SQ_0433 | | SQ_0430 | SQ_0440 | SQ_0419 | M | 54 |

| CRC | | | | | | |
|---|---|---|---|---|---|---|
| PATIENTS | | | | | | |
| LIST (RNA | HISTOTYPE | | | | | |
| SEQUENCING) | MAJOR | GRADE | pTNM:T | pTNM:N | pTNM:M | STAGE |
| PATIENT1 | ADC | G2 | 3 | 1A | 0 | IIIB |
| PATIENT2 | ADC | G2 | 3 | 0 | 0 | IIA |
| PATIENT3 | ADC | G2 | 4B | 1B | 0 | IIIB |
| PATIENT4 | ADC | G2 | 3 | 1A | 0 | IIIB |
| PATIENT5 | ADC | G2 | 3 | 0 | 0 | IIA |
| PATIENT6 | MUC ADC | — | 3 | 1B | 0 | IIIB |
| PATIENT7 | ADC | G2 | 4B | 0 | 0 | IIC |
| PATIENT8 | MUC ADC | — | 3 | 1C | 0 | IIIB |
| PATIENT9 | ADC | G2 | 2 | 0 | 0 | I |

ADC = Adenocarcinoma
MUC ADC = Mucinous Adenocarcinoma
CRIB ADC = Cribrous Adenocarcinoma
(T) = Subsets purified from Tumor Sample
(H) = Subsets purified from Healthy Tissue

| TUMOR | | | | | | | | | |
|---|---|---|---|---|---|---|---|---|---|
| INFILTRATING | | | | | | | | | |
| TREG FROM CRC | | | HISTOTY | | | | | | |
| (SINGLE CELL | | | PE | | | | | | CAPTURED |
| qPCR) | GENDER | AGE(y) | MAJOR | GRADE | pTNM:T | pTNM:N | pTNM:M | STAGE | SINGLE CELLS |
| PATIENT1 | M | 64 | ADC | 2 | 3 | 0 | 0 | IIA | 62 |
| PATIENT2 | M | 59 | CRIB ADC | — | 3 | 0 | 0 | IIA | 66 |
| PATIENT3 | F | 75 | MUC ADC | — | 4A | 2B | 0 | IIIC | 65 |
| PATIENT4 | M | 71 | ADC | 1 | 3 | 0 | 0 | IIA | 63 |
| PATIENT5 | M | 64 | ADC | 2 | 3 | 0 | 0 | IIA | 64 |

ADC = Adenocarcinoma
MUC ADC = Mucinous Adenocarcinoma
CRIB ADC = Cribrous Adenocarcinoma
(T) = Subsets purified from Tumor Sample
(H) = Subsets purified from Healthy Tissue

[0224] To assess Treg cell function, inventors tested their suppressor activity and showed that Treg cells infiltrating either type of tumor tissues have a remarkably stronger suppressive activity in vitro compared to Treg cells isolated from the adjacent normal tissue and peripheral blood of the same patients (FIG. 1B).

[0225] The polyadenylated RNA fraction extracted from the sorted CD4+ Treg, Th1, and Th17 cells was then analyzed by pair-end RNA sequencing obtaining about 4 billion mapped “reads” (Table I). First, inventors interrogated RNA-sequencing data of CD4+ T cells infiltrating both CRC and NSCLC and their matched normal tissues, to quantitate mRNA expression of known immune checkpoints and their ligands. Second, inventors analyzed RNA-seq data of CRC and NSCLC, as well as of normal colon and lung samples. Inventors found that several immune checkpoints and their ligands transcripts were strikingly upregulated in tumor infiltrating Treg cells compared to both normal tissue and peripheral blood-derived Treg cells, as well as to T and B lymphocyte subsets purified from peripheral blood mononuclear cells (PBMCs) (FIGS. 1C and 6C and Table III).

TABLE III
related to FIG. 1. Expression levels of immune checkpoints genes in all the subsets analyzed.

| GENE | Treg_Tumor_Infiltrating | Treg_Tumor_Infiltrating | Treg_Tissue_Infiltrating | Treg_Tissue_Infiltrating | Treg healthy |
|---|---|---|---|---|---|
| NAME | CRC | NSCLC | Colon | Lung | Peripheral Blood |
| ADORA2A | 14.69 | 24.06 | 17.97 | 44.84 | 18.52 |
| BTLA | 554.04 | 742.11 | 389.51 | 208.76 | 108.2 |
| BTNL2 | 0 | 0.14 | 0.29 | 0 | 0.75 |
| (BTLN2) | | | | | |
| C10orf54 | 779.38 | 872.36 | 555.47 | 1405.63 | 1111.37 |
| (VISTA) | | | | | |
| CD160 | 58.39 | 38.24 | 51.87 | 34.54 | 36.55 |
| CD200 | 268.39 | 283.21 | 282.05 | 104.64 | 99.59 |
| CD200R1 | 95.89 | 136.08 | 81.36 | 349.99 | 59.03 |
| CD244 | 34.46 | 31.21 | 29.59 | 128.35 | 47.8 |
| CD27 | 710.13 | 1068.55 | 583.58 | 496.38 | 468.93 |
| CD274 | 1050.94 | 645.66 | 576.59 | 390.71 | 120.19 |
| (PD-L1) | | | | | |
| CD276 | 16.85 | 72.3 | 10.44 | 65.98 | 3.61 |
| CD28 | 4770.41 | 4585.17 | 5446.29 | 3687.01 | 5179.32 |
| CD40 | 112.04 | 161.29 | 80.64 | 93.3 | 34.71 |
| CD40LG | 135.51 | 143.07 | 360.09 | 418.55 | 104.22 |
| CD44 | 13049.36 | 8518.98 | 13513.69 | 19851 | 16013.71 |
| CD48 | 346.61 | 489.78 | 494.58 | 594.83 | 1523.63 |
| CD70 | 426.35 | 269.38 | 318.97 | 249.48 | 101.67 |
| CD80 | 632.12 | 483.34 | 318.48 | 269.06 | 114.41 |
| CD86 | 29.52 | 78.86 | 52.72 | 278.86 | 3.87 |
| CTLA4 | 6798.82 | 10378.3 | 4810.74 | 5340.06 | 4806.23 |
| HAVCR2 | 577.57 | 633.27 | 265.84 | 487.62 | 49.81 |
| (TIM-3) | | | | | |
| HHLA2 | 3.41 | 3.66 | 4.47 | 9.28 | 12.7 |
| ICOS | 6830.94 | 7339.08 | 4119.2 | 5211.71 | 3398.28 |
| ICOSLG | 58.02 | 8.86 | 59.13 | 33.5 | 76.5 |
| (B7RP1) | | | | | |
| IDO1 | 3.86 | 83.81 | 9.51 | 5.15 | 2.36 |
| IDO2 | 0.22 | 2.25 | 1.41 | 5.15 | 1.58 |
| KIR3DL1 | 0.38 | 0.43 | 0.28 | 4.64 | 0.9 |
| (KIR) | | | | | |
| LAG3 | 705.14 | 1956.22 | 2181.52 | 1505.63 | 127.02 |
| LAIR1 | 277.06 | 194.09 | 551.94 | 874.72 | 346.22 |
| LGALS9 | 1175.81 | 1530.47 | 1160.89 | 1593.26 | 592.56 |
| (Galectin-9) | | | | | |
| NRP1 | 7.38 | 36.24 | 8.89 | 106.7 | 8.59 |
| PDCD1LG2 | 214.51 | 223.04 | 61.89 | 25.77 | 12.12 |
| (PD-L2) | | | | | |
| PDCD1 | 467.22 | 496.56 | 405.01 | 676.27 | 111.26 |
| (PD1) | | | | | |
| TIGIT | 14821.45 | 14747.79 | 10986.74 | 4901.41 | 4611.14 |
| TMIGD2 | 28.38 | 16.64 | 78.3 | 75.77 | 71.27 |
| TNFRSF14 | 2230.85 | 2677.32 | 2297.43 | 2675.7 | 2274.82 |
| (HVEM) | | | | | |
| TNFRSF18 | 4038.86 | 4078.14 | 2871.78 | 3071.57 | 333.36 |
| (GITR) | | | | | |
| TNFRSF25 | 5236.86 | 4188.61 | 4986.56 | 5111.71 | 3587.58 |
| TNFRSF4 | 4222.16 | 4642.56 | 2873.16 | 2992.18 | 400.56 |
| (OX40) | | | | | |
| TNFRSF8 | 155.59 | 430.23 | 115.57 | 208.24 | 30.89 |
| (CD30) | | | | | |
| TNFRSF9 | 2921.72 | 3128.82 | 898.69 | 1739.13 | 502.86 |
| (4-1BB) | | | | | |
| TNFSF14 | 148.57 | 183.77 | 223.49 | 421.12 | 105.12 |
| (LIGHT) | | | | | |
| TNFSF15 | 1.58 | 3.75 | 0.89 | 25.77 | 1.23 |
| TNFSF18 | 0.4 | 1.11 | 0.53 | 0 | 0.45 |
| TNFSF4 | 110.82 | 136.82 | 100.95 | 98.97 | 16.33 |
| (OX40LG) | | | | | |
| TNFSF9 | 26.79 | 19.48 | 19.72 | 29.9 | 7.41 |
| (CD137L) | | | | | |
| VTCN1 | 1.12 | 4.49 | 1.48 | 1.55 | 2.65 |
| (B7-H4) | | | | | |

[0226] RNA-seq normalized counts data for selected immune checkpoints genes and their ligands in all the subsets analyzed.

[0227] These findings highlight the specific expression patterns of immune checkpoints and their ligands in tumor infiltrating Treg and effector cells and suggest that their functional relevance should be investigated directly at tumor sites.

[0228] Tumor-Infiltrating Treg Cells Express a Specific Gene Signature

[0229] The inventors then asked whether tumor infiltrating Treg cells could be defined by specific gene expression patterns.

[0230] To identify signature transcripts of tumor-infiltrating Treg cells, the inventors included in the expression pattern analyses the transcriptome dataset they previously obtained from different T and B lymphocyte subsets purified from PBMCs (Ranzani et al., 2015). In so doing, the inventors obtained a signature of 328 transcripts whose expression is higher in tumor infiltrating Treg cells (Wilcoxon Mann Whitney test p<2.2×10-16) (FIG. 2, and Table IV compared to the other lymphocyte subsets purified from non-tumoral tissues and from PBMCs of healthy or neoplastic patients.

TABLE IV
related to FIG. 2. Expression levels of tumor-infiltrating Treg gene signatures in all the subsets analysed.
Normalized expression values of tumour-infiltrating Treg signature genes across listed cell populations.

| Gene | Treg_Tumor_Infiltrating | Treg_Tumor_Infiltrating | Treg_Tissue_Inflitrating | Treg_Tissue_Inflitrating | Treg healthy |
|---|---|---|---|---|---|
| Name | CRC | NSCLC | Colon | Lung | Peripheral Blood |
| AC019206.1 | 15.41 | 8.72 | 12.89 | 12.04 | 29.46 |
| ACAA2 | 305.76 | 499.02 | 497.41 | 526.58 | 614.28 |
| ACOT9 | 918.3 | 803.71 | 1361.82 | 2180.66 | 1272.07 |
| ACOX3 | 183.48 | 384.73 | 469.06 | 506.97 | 439.27 |
| ACP5 | 267.7 | 837.72 | 859.77 | 1872.29 | 1483.27 |
| ACSL4 | 1154.87 | 1384.88 | 1903.56 | 2170.94 | 2043.91 |
| ACTA2 | 86.65 | 270.74 | 108.76 | 234.86 | 232.15 |
| ACTG2 | 10.69 | 6.16 | 22.68 | 21.11 | 36.14 |
| ADAM10 | 2378.26 | 3051.7 | 2545.29 | 3600.38 | 3167.56 |
| ADAT2 | 927.45 | 1272.17 | 1214.4 | 2094.25 | 3103.21 |
| ADPRH | 136.34 | 460.61 | 352.57 | 836.7 | 718.74 |
| AHCYL1 | 914.19 | 1271.5 | 1269.55 | 1835.94 | 1711.94 |
| AHCYL2 | 305.15 | 570.67 | 525.24 | 790.1 | 856.25 |
| AKAP5 | 174.24 | 264 | 358.75 | 709.28 | 535.97 |
| AKIP1 | 261.47 | 273.85 | 225.25 | 436.84 | 360.48 |
| ANKRD10 | 2251.92 | 3433.73 | 2805.08 | 4192.8 | 4672.81 |
| ARHGEF12 | 1371.05 | 2064.05 | 1536.04 | 3069.77 | 2637.79 |
| ARHGEF4 | 19.42 | 71.47 | 28.87 | 195.02 | 252.84 |
| ARL6IP5 | 3008.69 | 4385.74 | 4051.43 | 4983.16 | 4712.48 |
| ARNTL2 | 20.4 | 201.3 | 281.95 | 560.77 | 445.13 |
| ATP13A3 | 3776.14 | 4020.7 | 4688.02 | 6688.94 | 6967.94 |
| ATP2C1 | 1491.87 | 1399.81 | 1553.57 | 2029.41 | 1819.78 |
| AURKA | 24.56 | 50.12 | 79.89 | 66.37 | 87.07 |
| BATF | 820.97 | 3325.93 | 1698.92 | 5052.64 | 2727.65 |
| BCL2L1 | 212.64 | 478.8 | 537.61 | 554.11 | 892.28 |
| BIRC5 | 14.74 | 20.27 | 20.62 | 25.03 | 44.99 |
| C17orf96 | 19 | 174.31 | 159.79 | 239.88 | 377.03 |
| C5orf63 | 146.45 | 201.44 | 112.88 | 228.2 | 357.09 |
| CABLES1 | 59.04 | 196.68 | 125.77 | 473.94 | 386.73 |
| CACNB2 | 67.43 | 50.49 | 40.21 | 169.83 | 105.62 |
| CADM1 | 113.76 | 602.72 | 115.46 | 1766.12 | 901.32 |
| CALM3 | 2474.48 | 2829.3 | 2675.18 | 2954.03 | 4107.03 |
| CARD16 | 370.31 | 696.36 | 493.29 | 1220.7 | 823.89 |
| CARD17 | 41.87 | 96.94 | 54.12 | 101.19 | 132.95 |
| CASP1 | 925.29 | 1453.84 | 1521.09 | 2028.95 | 1980.45 |
| CASQ1 | 52.11 | 31.21 | 24.74 | 135.08 | 174.95 |
| CCNB2 | 18.28 | 27.62 | 34.02 | 51.57 | 58.08 |
| CCR8 | 255.66 | 578.27 | 1355.63 | 3127.33 | 2069.11 |
| CD177 | 2.36 | 204.74 | 299.99 | 718.58 | 470.27 |
| CD27 | 468.93 | 583.58 | 496.38 | 710.13 | 1068.55 |
| CD274 | 120.19 | 576.59 | 390.71 | 1050.94 | 645.66 |
| CD7 | 1622.12 | 6900.01 | 2829.82 | 9053.96 | 6919.59 |
| CDCA2 | 19.24 | 35.09 | 49.48 | 68.21 | 49.95 |
| CDH24 | 57.67 | 57.11 | 89.69 | 148.93 | 105.02 |
| CDK6 | 602.97 | 2175.36 | 2463.85 | 3580.4 | 3238.58 |
| CEACAM1 | 360.01 | 340.84 | 326.28 | 381.79 | 732.86 |
| CENPM | 43.72 | 39.12 | 61.85 | 72.94 | 61.32 |
| CEP55 | 56.18 | 88.17 | 223.71 | 220.17 | 273.64 |
| CGA | 1.08 | 13.59 | 22.68 | 334.28 | 9.73 |
| CHRNA6 | 14.46 | 218.49 | 67.52 | 336.38 | 504.28 |
| CHST11 | 1822.7 | 2085.92 | 2806.11 | 2790.19 | 2535.23 |
| CHST2 | 75.46 | 218.75 | 156.7 | 458.24 | 604.97 |
| CHST7 | 141.3 | 341.87 | 426.79 | 1087.21 | 333.3 |
| CIT | 89.25 | 105.13 | 155.15 | 150.2 | 262.67 |
| CLNK | 153.06 | 288.36 | 248.96 | 340.12 | 528.54 |
| CNIH1 | 1028.31 | 1005.46 | 935.03 | 2336.95 | 1101.87 |
| COL9A2 | 149.87 | 278.77 | 357.72 | 889.47 | 805.72 |
| CORO1B | 481.34 | 667.37 | 861.83 | 774.65 | 1040.47 |
| COX10 | 305.31 | 399.33 | 397.93 | 447.17 | 612.29 |
| CRADD | 77.04 | 155.66 | 277.31 | 394.31 | 306.61 |
| CREB3L2 | 739.04 | 1289.66 | 1415.94 | 2984.54 | 2590.37 |
| CSF1 | 313.09 | 1629.13 | 1609.75 | 2204.79 | 3288.67 |
| CSF2RB | 1069.75 | 1275.49 | 1290.69 | 2036.76 | 2531.99 |
| CTLA4 | 4806.23 | 4810.74 | 5340.06 | 6798.82 | 10378.3 |
| CTSC | 1026.76 | 2196.93 | 2514.88 | 3030.74 | 2767.27 |
| CTTNBP2NL | 85 | 200.53 | 248.45 | 500.75 | 267.16 |
| CX3CR1 | 9.57 | 63.99 | 123.71 | 341.79 | 293.28 |
| CXCL13 | 1.07 | 255.23 | 1145.33 | 1270.98 | 11433.26 |
| CYB5B | 714.26 | 1129.39 | 947.4 | 1156.4 | 1221.22 |
| CYP7B1 | 9.83 | 210.33 | 29.38 | 186.99 | 161.17 |
| DCPS | 153.25 | 210.26 | 210.82 | 191.31 | 271.71 |
| DFNB31 | 561.87 | 1636.56 | 1727.79 | 4251.83 | 2526.15 |
| DIRAS3 | 1.9 | 4.59 | 3.61 | 26.01 | 35.64 |
| DLGAP5 | 7.89 | 14.46 | 20.62 | 27.41 | 49.7 |
| DNPH1 | 160.15 | 650.05 | 321.13 | 683.55 | 576.77 |
| DOC2B | 10.47 | 3.42 | 5.15 | 14.23 | 238.86 |
| DPYSL2 | 208.98 | 189.08 | 580.4 | 591.32 | 618.42 |
| EBI3 | 7.47 | 103.59 | 56.7 | 148.96 | 200.74 |
| ECEL1 | 3.7 | 150.7 | 34.02 | 199.17 | 794.51 |
| EGLN1 | 977.29 | 969.32 | 1021.11 | 1381.2 | 1271.06 |
| EML2 | 861.51 | 1601.25 | 1643.25 | 2156.04 | 1957.43 |
| ENTPD1 | 752.88 | 2078.17 | 1447.38 | 4321.79 | 4162.57 |
| ERI1 | 354.33 | 862.86 | 932.45 | 1200.06 | 1070.15 |
| ETFA | 414.08 | 586.15 | 534.01 | 615.35 | 689.14 |
| ETV7 | 93.62 | 511.26 | 361.85 | 728.85 | 1111.55 |
| EVA1B | 21.39 | 35.63 | 26.8 | 42.86 | 47.36 |
| F5 | 2343.39 | 2346.94 | 2499.41 | 4868.41 | 4729.97 |
| FAAH2 | 244.19 | 431.76 | 209.27 | 737.44 | 699.42 |
| FAIM2 | 15.05 | 33.47 | 57.21 | 69.26 | 117.28 |
| FAM184A | 192.41 | 742.47 | 525.24 | 706.33 | 891.02 |
| FAM19A2 | 311.38 | 204.56 | 302.57 | 264.46 | 748.09 |
| FAM98B | 314.26 | 664.69 | 491.22 | 698.92 | 657.42 |
| FAS | 2337.14 | 5167.46 | 2712.81 | 5982.39 | 3656.21 |
| FBXO45 | 460.56 | 783.06 | 631.43 | 964.13 | 894.23 |
| FCRL3 | 1161.64 | 1997.02 | 938.63 | 3281.36 | 2699.01 |
| FKBP1A | 733.83 | 1240.62 | 1174.19 | 1377.67 | 1578.09 |
| FLNB | 1671.04 | 1363.04 | 1394.81 | 3395.38 | 2307.44 |
| FLVCR2 | 69.84 | 579.55 | 388.13 | 744.8 | 528.01 |
| FNDC3B | 377.47 | 501.27 | 506.17 | 1111.07 | 531.12 |
| FOXA1 | 2.7 | 11.87 | 17.01 | 70.68 | 18.22 |
| FOXM1 | 56.39 | 74.94 | 108.24 | 88.16 | 125.31 |
| FOXP3 | 6586.98 | 10713.12 | 6060.66 | 13483.77 | 11472.41 |
| FUCA2 | 107.56 | 175.46 | 160.82 | 249.54 | 315.45 |
| GADD45A | 745.14 | 1431.9 | 884.51 | 3681.24 | 1396.98 |
| GCNT1 | 99.22 | 632.16 | 608.75 | 1133.62 | 845.83 |
| GK | 637.31 | 1994.73 | 2430.34 | 5200.55 | 2065.35 |
| GLB1 | 563.96 | 819.22 | 873.17 | 1077.84 | 854.94 |
| GLCCI1 | 1557.57 | 3211.73 | 1753.04 | 3189.77 | 2909.06 |
| GLDC | 19.25 | 20.56 | 25.26 | 31.21 | 74.61 |
| GLRX | 1213.06 | 1251.64 | 1512.85 | 1764.61 | 1872 |
| GNG4 | 5.08 | 79.18 | 64.43 | 197.1 | 343.93 |
| GNG8 | 11.94 | 63.28 | 10.82 | 67.63 | 175.16 |
| GRSF1 | 1277.4 | 1725.67 | 1397.9 | 2899.76 | 2343.4 |
| GSK3B | 1099.5 | 1267.18 | 1208.73 | 1333.16 | 1454.67 |
| GTF3C6 | 313.17 | 579.04 | 445.86 | 617.48 | 597.55 |
| GTSF1L | 13.67 | 20.36 | 15.46 | 44.6 | 99.03 |
| HADHB | 1179.61 | 1207.14 | 1287.59 | 1396.89 | 1521.16 |
| HAP1 | 92.39 | 180.51 | 74.22 | 292.97 | 577 |
| HAVCR2 | 49.81 | 265.84 | 487.62 | 577.57 | 633.27 |
| HECW2 | 17.63 | 98.93 | 38.66 | 111.21 | 177.5 |
| HIBCH | 124.32 | 290.04 | 226.8 | 348.34 | 332.88 |
| HIVEP3 | 358.34 | 649.68 | 893.27 | 1091.96 | 1316.89 |
| HJURP | 8.55 | 18.52 | 15.98 | 27.13 | 39.99 |
| HOXA1 | 16.66 | 15.22 | 14.95 | 25.57 | 44.75 |
| HPRT1 | 442.58 | 532.66 | 542.25 | 811.75 | 724.15 |
| HPSE | 248.88 | 676.54 | 515.45 | 674.09 | 754.04 |
| HS3ST3B1 | 1222.43 | 1930.88 | 1980.87 | 2609.49 | 2431.83 |
| HSDL2 | 242.56 | 611.72 | 285.56 | 785.27 | 921.97 |
| HTATIP2 | 567.61 | 1439.29 | 997.4 | 3285.86 | 1576.24 |
| ICA1 | 94.65 | 371.57 | 113.91 | 487.68 | 411.64 |
| ICOS | 3398.28 | 4119.2 | 5211.71 | 6830.94 | 7339.08 |
| IGFLR1 | 67.43 | 78.13 | 92.78 | 108.12 | 185.13 |
| IKZF2 | 6061.48 | 6317.6 | 4919.45 | 9983.52 | 8551.49 |
| IKZF4 | 1422.66 | 2362.49 | 1258.21 | 3745.25 | 3958.19 |
| IL12RB2 | 120.8 | 369.84 | 509.78 | 835.92 | 877.51 |
| IL17REL | 9.74 | 23.21 | 34.02 | 52.62 | 57.04 |
| IL1R1 | 506.51 | 9670.81 | 2766.42 | 7852.18 | 5585.89 |
| IL1R2 | 41.72 | 1225.4 | 526.79 | 2117.34 | 1793.21 |
| IL1RL1 | 17.37 | 135.26 | 44.33 | 715.42 | 71.67 |
| IL1RL2 | 8.65 | 76.53 | 28.35 | 74.81 | 59.47 |
| IL21R | 708.61 | 1355.83 | 1715.93 | 3092.3 | 3514.36 |
| IL2RA | 5244.31 | 9685.38 | 5627.68 | 11454.42 | 12731.31 |
| IL2RB | 6716.4 | 14249.6 | 12502.75 | 17733 | 18564.35 |
| IL32 | 4332.08 | 13202.73 | 9755.92 | 11766.98 | 13883.45 |
| IL7 | 117.66 | 230.78 | 165.97 | 257.71 | 178.1 |
| INPP1 | 124.25 | 497.01 | 312.88 | 458.2 | 487.93 |
| INPP5F | 787.92 | 2172.55 | 830.9 | 2189.48 | 1549.46 |
| ISOC1 | 233.44 | 329.49 | 400.5 | 514.43 | 335.93 |
| ITFG1 | 313.34 | 324.11 | 402.05 | 396.94 | 511.86 |
| JAK1 | 10779.78 | 11919.66 | 10072.4 | 17755.9 | 11521.32 |
| JAKMIP1 | 291.14 | 387.49 | 1063.89 | 756.36 | 953.47 |
| KAT2B | 3145.05 | 3910.01 | 4756.57 | 5520.88 | 4632.76 |
| KIF14 | 20.18 | 25.43 | 31.96 | 36.73 | 59.61 |
| KIF15 | 20.64 | 29.67 | 51.03 | 41.9 | 68.63 |
| KIF20A | 9.84 | 14.93 | 7.22 | 20.97 | 32.72 |
| KLHDC7B | 131.39 | 211.42 | 188.65 | 245.3 | 394.73 |
| KSR1 | 837.87 | 1569.86 | 1176.77 | 2241.36 | 1847.72 |
| LAPTM4B | 86.42 | 369.78 | 181.44 | 938.88 | 738.38 |
| LAX1 | 1135.24 | 1155.91 | 1406.15 | 1721.7 | 1854.78 |
| LAYN | 441.73 | 796.76 | 859.25 | 2650.24 | 1681.25 |
| LEPR | 58.77 | 130.22 | 129.38 | 137.47 | 237.88 |
| LEPROT | 614.73 | 860.55 | 676.79 | 1044.66 | 1296.13 |
| LHFP | 1.58 | 10.38 | 9.79 | 18.09 | 63.16 |
| LIMA1 | 404.55 | 727.57 | 1017.5 | 1064.46 | 1570.15 |
| LMCD1 | 115.76 | 104.74 | 112.37 | 257.92 | 404.7 |
| LOC388813 | 7.42 | 45.99 | 28.87 | 86.3 | 60.63 |
| LRG1 | 17.67 | 61.54 | 46.39 | 71.6 | 78.3 |
| LRRC61 | 98.78 | 291.45 | 138.66 | 292.51 | 314.79 |
| LTA | 214.07 | 516.57 | 270.61 | 351.26 | 747.01 |
| LXN | 67.37 | 91.06 | 75.77 | 114.23 | 133.43 |
| LY75 | 249.92 | 970.85 | 680.91 | 1302.79 | 1624.82 |
| MAGEH1 | 461.13 | 1349.51 | 448.96 | 2800.36 | 3719.29 |
| MALT1 | 3362.14 | 3568.46 | 2743.74 | 5892.86 | 4776.24 |
| MAP1LC3A | 70.92 | 110.44 | 119.07 | 272.07 | 169.3 |
| MAP3K5 | 1865.12 | 2189.99 | 1787.06 | 2822.55 | 2265.54 |
| MAST4 | 1053.08 | 2239.36 | 2198.39 | 3373.36 | 1855.42 |
| MAT2B | 2305.62 | 4050.5 | 2959.2 | 4435.41 | 4159.25 |
| MCCC2 | 737.75 | 875.78 | 873.69 | 1018.1 | 1245.79 |
| MELK | 28.77 | 50.08 | 83.5 | 72.28 | 83.06 |
| METTL7A | 280.99 | 442.99 | 385.04 | 845.09 | 1671.74 |
| METTL8 | 318.99 | 882.21 | 377.82 | 880.99 | 1413.12 |
| MGME1 | 236.76 | 332.08 | 342.77 | 400.19 | 552.69 |
| MGST2 | 54.22 | 87.18 | 69.59 | 147.04 | 148.13 |
| MICAL2 | 354.6 | 1601.79 | 1813.35 | 1910.22 | 3188.92 |
| MINPP1 | 85.19 | 204.32 | 211.85 | 243.22 | 290.02 |
| MKI67 | 192.68 | 206.77 | 518.03 | 372.61 | 650.04 |
| MREG | 120.75 | 119.91 | 226.28 | 229.41 | 325.33 |
| MYL6B | 122.13 | 182.71 | 107.73 | 174.22 | 252.52 |
| MYO5C | 95.68 | 122.36 | 157.21 | 130.81 | 347.49 |
| NAB1 | 508.21 | 973.74 | 1261.31 | 1831.77 | 1227.51 |
| NCALD | 111.73 | 163.32 | 272.67 | 283.43 | 370.26 |
| NCAM1 | 7.88 | 58.27 | 39.69 | 207.45 | 213.23 |
| NCF4 | 509.63 | 630.55 | 880.39 | 894.67 | 1176.84 |
| NCOA1 | 2088.38 | 2062.57 | 1941.7 | 2367.54 | 2618.11 |
| NDFIP2 | 77.99 | 529.73 | 618.54 | 829.53 | 987.25 |
| NEMP2 | 382.56 | 478.4 | 475.76 | 565.18 | 634.41 |
| NETO2 | 145.84 | 559.95 | 773.69 | 1490.82 | 1137.73 |
| NEURL3 | 4.04 | 29.74 | 12.37 | 24.02 | 35.49 |
| NFAT5 | 2075.17 | 3880.92 | 3923.6 | 4786.04 | 5295.06 |
| NFE2L3 | 279.28 | 590.19 | 560.29 | 743.24 | 1114.26 |
| NFYC | 588.49 | 713.51 | 756.16 | 733.52 | 798.27 |
| NHS | 7.27 | 18.73 | 55.15 | 60.16 | 159.44 |
| NPTN | 525.86 | 838.02 | 897.91 | 1007.87 | 969.1 |
| NTNG2 | 117.04 | 296.81 | 534.52 | 669.43 | 1001.58 |
| NTRK1 | 20.85 | 27.9 | 155.15 | 88.29 | 161.78 |
| NUSAP1 | 199.28 | 266.11 | 445.86 | 635.51 | 365.17 |
| NXT2 | 221.6 | 263.39 | 226.8 | 285.15 | 302.01 |
| OSBP2 | 111.03 | 89.82 | 127.83 | 195.47 | 244.93 |
| PAK2 | 4621.62 | 6173.86 | 5024.6 | 7194.78 | 6376.28 |
| PAM | 582.52 | 904.05 | 1069.56 | 1365.03 | 1631.64 |
| PANX2 | 3.7 | 76.02 | 15.46 | 97.12 | 71.72 |
| PAQR4 | 16.99 | 46.54 | 62.37 | 92.6 | 65.27 |
| PARD6G | 55.86 | 172.18 | 249.99 | 546.52 | 182.4 |
| PARK7 | 1271.06 | 1563.96 | 1283.47 | 1764.8 | 1764.91 |
| PCTP | 49.2 | 173.47 | 163.4 | 253.27 | 270.62 |
| PDCD1LG2 | 12.12 | 61.89 | 25.77 | 214.51 | 223.04 |
| PDGFA | 6.19 | 38.74 | 159.79 | 154.17 | 153.03 |
| PEX3 | 179.31 | 239.78 | 205.66 | 326.61 | 291.17 |
| PGM2 | 316.91 | 419.51 | 454.63 | 471.89 | 487.85 |
| PHKA1 | 8.59 | 19.98 | 28.87 | 107.79 | 109.7 |
| PIGU | 147.54 | 205.18 | 184.53 | 220.25 | 265.12 |
| PLA2G4C | 22.16 | 128.81 | 65.98 | 245.65 | 159.6 |
| PPM1G | 1974.96 | 2324.16 | 2563.85 | 2751.69 | 2598.5 |
| PRDX3 | 466.56 | 854.12 | 745.34 | 890.58 | 1052.67 |
| PRKCDBP | 4.45 | 6.8 | 19.07 | 28.51 | 27.92 |
| PROB1 | 53.7 | 140.39 | 109.79 | 177.19 | 272.89 |
| PTGIR | 96.17 | 147.61 | 107.21 | 214.61 | 449.25 |
| PTP4A3 | 134.06 | 262.63 | 463.39 | 340.08 | 667.84 |
| PTPRJ | 2654.92 | 3999.84 | 5584.38 | 6101.63 | 7239.3 |
| PTTG1 | 211.97 | 198.56 | 236.59 | 302.53 | 335.68 |
| RAB15 | 160.6 | 470.25 | 302.05 | 420.06 | 519.4 |
| RAD51AP1 | 29.89 | 46.33 | 40.21 | 49.23 | 51.73 |
| RASAL1 | 18.87 | 53.37 | 50 | 87.38 | 238.78 |
| RBKS | 67.62 | 56.45 | 133.5 | 141.16 | 85.46 |
| RCBTB1 | 1154.33 | 1312.01 | 1131.41 | 1960.76 | 1384.84 |
| RDH10 | 194.04 | 311.58 | 467.51 | 658.5 | 1448.57 |
| REXO2 | 487.9 | 832.35 | 648.44 | 852.58 | 987.43 |
| RFK | 378.31 | 396.91 | 292.26 | 460.78 | 452.8 |
| RGS1 | 16547.6 | 15176.27 | 18057.75 | 23425.18 | 17168.17 |
| RHOC | 78.07 | 230.17 | 207.21 | 317.85 | 290.86 |
| RMI2 | 19.46 | 76.58 | 39.69 | 70.44 | 73.47 |
| RNF145 | 1625.11 | 3074.78 | 2117.47 | 4417.29 | 3266.94 |
| RNF207 | 41.75 | 469.3 | 314.94 | 723.56 | 765.87 |
| RRAGB | 281.49 | 274.98 | 196.9 | 384.81 | 506.1 |
| RYBP | 1861.27 | 2273.72 | 2496.32 | 3178.31 | 2818.02 |
| SEC14L6 | 6.42 | 86.23 | 27.32 | 179.47 | 274.97 |
| SEC24A | 718 | 917.25 | 1157.7 | 1259.04 | 1062.95 |
| SECTM1 | 69.01 | 1347.35 | 725.75 | 2354.1 | 1511.04 |
| SEPT3 | 15.6 | 59.23 | 49.48 | 149.11 | 244.4 |
| SGPP2 | 428.14 | 656.73 | 364.94 | 1001.71 | 809.92 |
| SH3RF2 | 20.9 | 18.3 | 65.98 | 98.4 | 196.34 |
| SIRPG | 433.99 | 605.49 | 317 | 575.41 | 1245.12 |
| SLC16A1 | 947.47 | 1385.08 | 1532.43 | 2050.74 | 1460.73 |
| SLC25A12 | 246.72 | 323.6 | 423.18 | 406.15 | 498.91 |
| SLC35E3 | 385.3 | 451.16 | 370.09 | 582.86 | 653.13 |
| SLC35F2 | 378.22 | 795.55 | 688.64 | 1130.81 | 880.5 |
| SLC41A1 | 1194.29 | 1119.86 | 1164.92 | 1401.41 | 1630.88 |
| SLC41A2 | 13.45 | 356.73 | 114.95 | 482.48 | 395.27 |
| SMAD1 | 15.34 | 53.93 | 30.41 | 63.54 | 87.46 |
| SMS | 565.6 | 760.65 | 719.57 | 818.12 | 735.99 |
| SNAP47 | 310.71 | 503.77 | 577.82 | 690.31 | 696.18 |
| SOCS2 | 245.77 | 405.76 | 463.39 | 605.25 | 611.78 |
| SOX4 | 128.76 | 244.57 | 218.04 | 1205.78 | 715.01 |
| SPATA24 | 38.86 | 77.02 | 36.6 | 66.43 | 94.41 |
| SPATC1 | 7.97 | 10.96 | 19.59 | 61.51 | 55.84 |
| SPATS2L | 366.98 | 891.61 | 1172.13 | 1430.11 | 1531.61 |
| SSH1 | 1890.01 | 3432.55 | 2771.06 | 4390.36 | 4552.26 |
| SSTR3 | 230.28 | 248.12 | 341.74 | 240.77 | 901.25 |
| STAC | 11.63 | 48.36 | 39.69 | 75.94 | 71.4 |
| STARD7 | 2415.01 | 3185.95 | 3024.66 | 3809.46 | 3445.47 |
| STRIP2 | 103.39 | 1002.96 | 540.19 | 716.49 | 1192.77 |
| SYT11 | 1078.51 | 1733.37 | 2080.36 | 2110.18 | 2818.39 |
| TADA3 | 677.14 | 893.74 | 852.04 | 880.43 | 1189.01 |
| TBC1D8 | 53.89 | 374.1 | 265.97 | 817.36 | 1087.39 |
| TDRD3 | 461.34 | 383.25 | 520.09 | 584.64 | 643.84 |
| TFRC | 3608.04 | 4612.18 | 5640.05 | 8107.35 | 10082.21 |
| THADA | 1102.51 | 1505.13 | 1467.48 | 3472.21 | 3171.99 |
| TIGIT | 4611.14 | 10986.74 | 4901.41 | 14821.45 | 14747.79 |
| TM9SF2 | 2048.03 | 2689.14 | 2665.91 | 2935.98 | 3358.4 |
| TMA16 | 172.88 | 180.92 | 137.11 | 304.24 | 192.53 |
| TMEM140 | 273.98 | 640.28 | 574.73 | 917.16 | 691 |
| TMEM184C | 520.19 | 508.83 | 599.98 | 1170.37 | 519.43 |
| TMOD1 | 14.75 | 72.22 | 32.47 | 150.93 | 89.62 |
| TMPRSS3 | 70.84 | 352.78 | 321.64 | 540.8 | 1106.85 |
| TMPRSS6 | 113.53 | 548.87 | 265.97 | 698.41 | 985.34 |
| TNFRSF18 | 333.36 | 2871.78 | 3071.57 | 4038.86 | 4078.14 |
| TNFRSF4 | 400.56 | 2873.16 | 2992.18 | 4222.16 | 4642.56 |
| TNFRSF8 | 30.89 | 115.57 | 208.24 | 155.59 | 430.23 |
| TNFRSF9 | 502.86 | 898.69 | 1739.13 | 2921.72 | 3128.82 |
| TNIP3 | 28.73 | 485.83 | 213.91 | 324.53 | 419.8 |
| TOR4A | 141.27 | 291.3 | 346.9 | 358.98 | 326.51 |
| TOX2 | 237.46 | 860.48 | 490.71 | 861.08 | 1264.13 |
| TP73 | 7.86 | 31.27 | 39.69 | 78.27 | 93.99 |
| TPMT | 357.13 | 354.93 | 305.66 | 480.15 | 519.82 |
| TPP1 | 2589.92 | 6024.92 | 4380.81 | 7164.96 | 6236.83 |
| TPX2 | 106.25 | 89.08 | 184.02 | 150.35 | 202.77 |
| TRAF3 | 1140.85 | 3231.25 | 2706.11 | 4078.84 | 3554.01 |
| TRIB1 | 927.27 | 1820.64 | 1482.95 | 2402.58 | 1469.85 |
| TRIM16 | 160.05 | 115.2 | 121.13 | 240.55 | 210.13 |
| TSPAN17 | 709.59 | 1721.26 | 1322.64 | 1685.38 | 1865.69 |
| TSPAN5 | 372.4 | 1167.46 | 723.69 | 1230.67 | 1398.7 |
| TST | 3.8 | 26.32 | 26.8 | 39.78 | 41.65 |
| TTBK1 | 13.41 | 164.27 | 99.48 | 380.69 | 460.64 |
| TTC22 | 237.9 | 386.91 | 323.19 | 483.96 | 451.61 |
| TWIST1 | 4.21 | 94.46 | 21.65 | 95.32 | 195.78 |
| UGP2 | 1950.41 | 3283.79 | 2562.82 | 3399.18 | 2864.71 |
| USP51 | 48.1 | 133.95 | 28.87 | 233.48 | 291.46 |
| UXS1 | 1661.1 | 2156.16 | 1600.47 | 2614.66 | 1914.74 |
| VANGL1 | 97.19 | 192.58 | 248.96 | 263.46 | 289.05 |
| VDR | 123 | 992.41 | 1771.6 | 2616.68 | 3656.18 |
| VWA5A | 426.29 | 550.67 | 373.7 | 604.53 | 739.57 |
| WDHD1 | 101.74 | 126.37 | 140.2 | 136.76 | 193.58 |
| WDTC1 | 1220.3 | 3855.35 | 2029.33 | 4398.54 | 3774.61 |
| WSB1 | 2837.49 | 3876.77 | 4697.29 | 5090.18 | 5383.33 |
| XKRX | 16.06 | 71.84 | 90.2 | 115.05 | 101.81 |
| YIPF1 | 310.29 | 351.68 | 285.04 | 354.44 | 456.27 |
| YIPF6 | 342.01 | 687.07 | 705.14 | 1078.09 | 793.2 |
| ZBED2 | 87.53 | 94.86 | 522.15 | 230.51 | 1238.63 |
| ZBTB38 | 1986.89 | 5405.41 | 3134.97 | 6174.05 | 4680.43 |
| ZC3H12C | 123.76 | 159.39 | 518.54 | 1191.95 | 985.54 |
| ZG16B | 3.42 | 17.03 | 15.46 | 32.31 | 32.59 |
| ZMAT3 | 529.91 | 925.46 | 822.66 | 1077.17 | 1234.3 |
| ZMYND8 | 585.94 | 675.31 | 711.84 | 850.29 | 1131.01 |
| ZNF280C | 181.86 | 444.81 | 326.28 | 635.21 | 467.78 |
| ZNF280D | 698.54 | 973.93 | 616.48 | 1061.55 | 1290.04 |
| ZNF282 | 374.36 | 1273.4 | 2253.55 | 2562.43 | 3165.99 |
| ZNF334 | 6.95 | 26.52 | 17.53 | 40.03 | 100.33 |
| ZWINT | 60.55 | 73.28 | 101.03 | 87.1 | 105.4 |

[0231] Altogether, the data show that Treg cells display the most pronounced differences in transcripts expression among CD4⁺ T cell subsets infiltrating normal and tumor tissues. The inventors defined a subset of signature genes that describe the specific gene expression profile of tumor infiltrating Treg cells.

[0232] Gene Signature of Tumor-Infiltrating Treg Cells is Present in Primary and Metastatic Human Tumors

[0233] The inventors then looked at the single cell level for the differential expression profile of signature genes of tumor infiltrating Treg cells. The inventors isolated CD4⁺ T cells from 5 CRC and 5 NSCLC tumor samples as well as from 5 PBMCs of healthy individuals (Table II), purified Treg cells, and using an automated microfluidic system (C1 Fluidigm) captured single cells (a total of 858 Treg cells: 320 from CRC and 286 from NSCLC; 252 from PBMCs of healthy individuals). The inventors then assessed by high throughput RT-qPCR (Biomark HD, Fluidigm) the expression of 79 genes selected among the highly expressed (>10 FKPM) tumor Treg cell signature genes (FIGS. 3A, 3C and 7).

[0234] Notably, it was found that the vast majority (75 over 79; 95%) of the tumor-infiltrating Treg cell signatures were co-expressed with bona fide Treg cell markers (i.e., FOXP3⁺ and IL2RA) (FIG. 3B). The percentage of co-expression between these Treg cell markers and the 79 genes selected among the tumor-infiltrating-Treg-cell signature genes ranged between 81% of TIGIT and 0.59% of CGA (FIG. 3B). The expression of Treg signature genes in the RNA-seq of the whole Treg cell population correlated with the percentage of single cells expressing the different genes (FIG. 3C). In order to reduce the “drop-out” effect of the single cell data (i.e., events in which a transcript is detected in one cell but not in another one because the transcript is ‘missed’ during the reverse-transcription step) (Kharchenko et al., 2014), a threshold (median value t=8.4%) was defined based on the expression distribution for each transcript and discarded genes below this threshold. The forty-five signature transcripts of tumor infiltrating Treg cells detected above this threshold were in most cases significantly over-expressed in Treg cells from both tumors (39 over 45, 87%; Wilcoxon Mann Whitney test p<0.05) or in one tumor type (43 over 45, 96%; FIG. 3D). Homogeneity of the purified tissue infiltrating Treg cells can be affected by the carry-over of cells from other lymphocyte subsets. To quantitate this possible contamination, the single cell RT-qPCR analyses of Treg cells was performed including markers specific for other lymphocytes subsets (i.e., Th1, Th2, Th17, Tfh, CD8 T cells, B cells) (FIG. 7). Our data showed that only a very low fraction of the purified single cells displayed markers of lymphocytes subsets different from Treg cells (FIG. 7).

[0235] The overlap between the signature genes in the CRC and NSCLC infiltrating Treg cells (FIG. 2) prompted us to assess whether this signature were also enriched in Treg cells infiltrating other tumors. RNA was thus extracted from Treg cells infiltrating breast cancer, gastric cancer, brain metastasis of NSCLC, and liver metastasis of CRC. It was found by RT-qPCR that tumor infiltrating Treg signatures genes were mostly upregulated also in these tumors (FIG. 3E).

[0236] Overall these data show that the tumor-infiltrating Treg cell signature genes are co-expressed at single cell level with FOXP3 and IL2RA and that several primary and metastatic human tumors express the tumor-infiltrating Treg cell signature.

[0237] Gene Signature of Tumor Infiltrating Treg Cells is Translated in a Protein Signature

[0238] The inventors then assessed at the single cell level by flow cytometry the protein expression of ten representative signature genes present in CRC and NSCLC infiltrating Treg cells, adjacent normal tissues, and patients PBMCs. Of the ten proteins, two are proteins (OX40 and TIGIT) whose relevance for Treg cells biology has been demonstrated (Joller et al., 2014; Voo et al., 2013), seven are proteins (BATF, CCR8, CD30, IL-1R2, IL-21R, PDL-1 and PDL-2) whose expression has never been described in tumor-infiltrating Treg cells, and one protein, 4-1BB, is a co-stimulatory receptor expressed on several hematopoietic cells, whose expression on Treg cells has been shown to mark antigen-activated cells (Schoenbrunn et al., 2012). Our findings showed that all these proteins were upregulated (FIGS. 4A and 4B), at different extent, in tumor infiltrating Treg cells compared to the Treg cells resident in normal tissues.

[0239] Altogether, our data show there is a molecular signature of tumor infiltrating Treg cells, which can be detected both at the mRNA and at the protein levels.

[0240] Expression of Tumor Treg Signature Genes is Negatively Correlated with Patients Survival

[0241] In an attempt to correlate our findings with clinical outcome, the inventors asked whether the expression of the tumor-Treg signature transcripts correlated with disease prognosis in CRC and NSCLC patients. The inventors therefore interrogated for expression of Treg signature genes transcriptomic datasets obtained from resected tumor tissues of a cohort of 177 CRC patients (GSE17536 (Smith et al., 2010) and of a cohort of 263 NSCLC patients (GSE41271—(Sato et al., 2013), and correlated high and low gene expression levels with the 5-years survival data. Among those genes whose expression is highly enriched in tumor infiltrating Treg cells, LAYN, MAGEH1 and CCR8 were selected as they are the three genes more selectively expressed (FIG. 9A-C). To normalize for differences in T cell densities within the resected tumor tissues, the inventors used the ratio between expression of the selected signature genes and CD3G. Remarkably, it was found that high expression of the three signature genes is in all cases correlated with a significantly reduced survival (FIG. 5A). Interestingly, it was also observed that expressions of the three signature genes increased with tumor staging of CRC patients (FIG. 5B).

[0242] In conclusion, high expression in the whole tumor samples of three genes (LAYN, MAGEH1 and CCR8) that are specifically and highly expressed in tumor infiltrating Treg cells, correlates with a poor prognosis in both NSCLC and CRC patients.

[0243] Selection of Potential Targets Specifically Over-Expressed on the Surface of Tumor-Infiltrating Treg

[0244] All annotated protein isoforms encoded by the 328 genes and retrievable in the public database EnsEMBL (http://www.ensembl.org) were simultaneously analysed with the four prediction algorithms and genes encoding at least one isoform predicted to be surface exposed were considered as potential targets.

[0245] Out of 328 genes, 193 encode for at least one potential cell surface protein isoform on the basis of at least one of the four predictors. The list of protein isoforms predicted to be membrane-associated is reported in Table VI.

TABLE VI

| | | | | | SEQ ID No |
|---|---|---|---|---|---|
| | | | | | of the aa |
| | | | | | sequence of |
| Gene | | ENSG ID | | | the protein |
| name | Description | release87 | ENST ID | ENSP ID | isoform |
| LAYN | Layilin | ENSG00000204381 | ENST00000375614 | ENSP00000364764 | 1 |
| | | | ENST00000375615 | ENSP00000364765 | 2 |
| | | | ENST00000436913 | ENSP00000392942 | 3 |
| | | | ENST00000525126 | ENSP00000434328 | 4 |
| | | | ENST00000525866 | ENSP00000434300 | 5 |
| | | | ENST00000528924 | ENSP00000486561 | 6 |
| | | | ENST00000530962 | ENSP00000431627 | 7 |
| | | | ENST00000533265 | ENSP00000434972 | 8 |
| | | | ENST00000533999 | ENSP00000432434 | 9 |
| CCR8 | C-C chemokine receptor type 8 | ENSG00000179934 | ENST00000326306 | ENSP00000326432 | 10 |
| | | | ENST00000414803 | ENSP00000390104 | 11 |
| IL21R | Interleukin-21 receptor | ENSG00000103522 | ENST00000337929 | ENSP00000338010 | 12 |
| | | | ENST00000395754 | ENSP00000379103 | 13 |
| | | | ENST00000564089 | ENSP00000456707 | 14 |
| FUCA2 | Plasma alpha-L-fucosidase | ENSG00000001036 | ENST00000002165 | ENSP00000002165 | 15 |
| | | | ENST00000451668 | ENSP00000398119 | 16 |
| ICA1 | Islet cell autoantigen 1 | ENSG00000003147 | ENST00000407906 | ENSP00000386021 | 17 |
| COX10 | Protoheme IX farnesyltransferase, | ENSG00000006695 | ENST00000261643 | ENSP00000261643 | 18 |
| | mit. | | | | |
| IL32 | Interleukin-32 | ENSG00000008517 | ENST00000008180 | ENSP00000008180 | 19 |
| | | | ENST00000396890 | ENSP00000380099 | 20 |
| | | | ENST00000525228 | ENSP00000431740 | 21 |
| | | | ENST00000525377 | ENSP00000433866 | 22 |
| | | | ENST00000530890 | ENSP00000433747 | 23 |
| | | | ENST00000534507 | ENSP00000431775 | 24 |
| | | | ENST00000548246 | ENSP00000447979 | 25 |
| | | | ENST00000548476 | ENSP00000449483 | 26 |
| | | | ENST00000548807 | ENSP00000448354 | 27 |
| | | | ENST00000551513 | ENSP00000449147 | 28 |
| | | | ENST00000552356 | ENSP00000446978 | 29 |
| | | | ENST00000552936 | ENSP00000447033 | 30 |
| ETV7 | Transcription factor ETV7 | ENSG00000010030 | ENST00000339796 | ENSP00000342260 | 31 |
| | | | ENST00000627426 | ENSP00000486712 | 32 |
| ATP2C1 | Calcium-transporting ATPase | ENSG00000017260 | ENST00000328560 | ENSP00000329664 | 33 |
| | type 2C member 1 | | ENST00000359644 | ENSP00000352665 | 34 |
| | | | ENST00000422190 | ENSP00000402677 | 35 |
| | | | ENST00000428331 | ENSP00000395809 | 36 |
| | | | ENST00000504381 | ENSP00000425320 | 37 |
| | | | ENST00000504571 | ENSP00000422489 | 38 |
| | | | ENST00000504612 | ENSP00000425228 | 39 |
| | | | ENST00000504948 | ENSP00000423330 | 40 |
| | | | ENST00000505072 | ENSP00000427625 | 41 |
| | | | ENST00000505330 | ENSP00000423774 | 42 |
| | | | ENST00000507194 | ENSP00000427087 | 43 |
| | | | ENST00000507488 | ENSP00000421326 | 44 |
| | | | ENST00000508297 | ENSP00000421261 | 45 |
| | | | ENST00000508532 | ENSP00000424783 | 46 |
| | | | ENST00000508660 | ENSP00000424930 | 47 |
| | | | ENST00000509662 | ENSP00000426849 | 48 |
| | | | ENST00000510168 | ENSP00000427461 | 49 |
| | | | ENST00000513801 | ENSP00000422872 | 50 |
| | | | ENST00000515854 | ENSP00000422890 | 51 |
| | | | ENST00000533801 | ENSP00000432956 | 52 |
| FAS | Fatty acid synthase | ENSG00000026103 | ENST00000352159 | ENSP00000345601 | 53 |
| | | | ENST00000355279 | ENSP00000347426 | 54 |
| | | | ENST00000355740 | ENSP00000347979 | 55 |
| | | | ENST00000357339 | ENSP00000349896 | 56 |
| | | | ENST00000479522 | ENSP00000424113 | 57 |
| | | | ENST00000484444 | ENSP00000420975 | 58 |
| | | | ENST00000488877 | ENSP00000425159 | 59 |
| | | | ENST00000492756 | ENSP00000422453 | 60 |
| | | | ENST00000494410 | ENSP00000423755 | 61 |
| | | | ENST00000612663 | ENSP00000477997 | 62 |
| PEX3 | Peroxisomal biogenesis factor 3 | ENSG00000034693 | ENST00000367591 | ENSP00000356563 | 63 |
| | | | ENST00000367592 | ENSP00000356564 | 64 |
| TSPAN17 | Tetraspanin-17 | ENSG00000048140 | ENST00000298564 | ENSP00000298564 | 65 |
| | | | ENST00000310032 | ENSP00000309036 | 66 |
| | | | ENST00000503030 | ENSP00000425975 | 67 |
| | | | ENST00000503045 | ENSP00000425212 | 68 |
| | | | ENST00000504168 | ENSP00000423957 | 69 |
| | | | ENST00000507471 | ENSP00000423610 | 70 |
| | | | ENST00000508164 | ENSP00000422053 | 71 |
| | | | ENST00000515708 | ENSP00000426650 | 72 |
| COL9A2 | Collagen alpha-2(IX) chain | ENSG00000049089 | ENST00000372736 | ENSP00000361821 | 73 |
| | | | ENST00000372748 | ENSP00000361834 | 74 |
| | | | ENST00000417105 | ENSP00000388493 | 75 |
| NFE2L3 | Nuclear factor erythroid 2-related | ENSG00000050344 | ENST00000056233 | ENSP00000056233 | 76 |
| | factor 3 | | | | |
| TNIP3 | TNFAIP3-interacting prot.3 | ENSG00000050730 | ENST00000515036 | ENSP00000424284 | 77 |
| LY75 | Lymphocyte antigen 75 | ENSG00000054219 | ENST00000263636 | ENSP00000263636 | 78 |
| YIPF1 | Protein YIPF1 | ENSG00000058799 | ENST00000072644 | ENSP00000072644 | 79 |
| | | | ENST00000371399 | ENSP00000360452 | 80 |
| | | | ENST00000412288 | ENSP00000416507 | 81 |
| | | | ENST00000464950 | ENSP00000432266 | 82 |
| ISOC1 | Isochorismatase domain- containing | ENSG00000066583 | ENST00000173527 | ENSP00000173527 | 83 |
| | protein 1 | | ENST00000514194 | ENSP00000421273 | 84 |
| ACSL4 | Long-chain-fatty-acid-CoA ligase 4 | ENSG00000068366 | ENST00000340800 | ENSP00000339787 | 85 |
| | | | ENST00000469796 | ENSP00000419171 | 86 |
| | | | ENST00000469857 | ENSP00000423077 | 87 |
| | | | ENST00000502391 | ENSP00000425408 | 88 |
| | | | ENST00000504980 | ENSP00000421425 | 89 |
| | | | ENST00000508092 | ENSP00000425378 | 90 |
| MAST4 | Microtubule-assoc.serine/threonine- | ENSG00000069020 | ENST00000434115 | ENSP00000396765 | 91 |
| | protein kinase 4 | | | | |
| LMCD1 | LIM and cysteine-rich domains protein 1 | ENSG00000071282 | ENST00000456506 | ENSP00000405049 | 92 |
| TFRC | Transferrin receptor protein 1 | ENSG00000072274 | ENST00000360110 | ENSP00000353224 | 93 |
| | | | ENST00000392396 | ENSP00000376197 | 94 |
| | | | ENST00000421258 | ENSP00000402839 | 95 |
| | | | ENST00000426789 | ENSP00000414015 | 96 |
| PANX2 | Pannexin-2 | ENSG00000073150 | ENST00000159647 | ENSP00000159647 | 97 |
| | | | ENST00000395842 | ENSP00000379183 | 98 |
| | | | ENST00000402472 | ENSP00000384148 | 99 |
| FNDC3B | Fibronectin type III domain-containing | ENSG00000075420 | ENST00000336824 | ENSP00000338523 | 100 |
| | protein 3B | | ENST00000415807 | ENSP00000411242 | 101 |
| | | | ENST00000416957 | ENSP00000389094 | 102 |
| | | | ENST00000421757 | ENSP00000408496 | 103 |
| | | | ENST00000423424 | ENSP00000392471 | 104 |
| IL12RB2 | Interleukin-12 receptor subunit beta-2 | ENSG00000081985 | ENST00000262345 | ENSP00000262345 | 105 |
| | | | ENST00000371000 | ENSP00000360039 | 106 |
| | | | ENST00000441640 | ENSP00000400959 | 107 |
| | | | ENST00000541374 | ENSP00000445276 | 108 |
| | | | ENST00000544434 | ENSP00000442443 | 109 |
| STARD7 | StAR-related lipid transfer protein 7, | ENSG00000084090 | ENST00000337288 | ENSP00000338030 | 110 |
| | mitochondrial | | | | |
| SSH1 | Protein phosphatase Slingshot homolog 1 | ENSG00000084112 | ENST00000546697 | ENSP00000446652 | 111 |
| | | | ENST00000548522 | ENSP00000448586 | 112 |
| MGST2 | Microsomal glutathione S-transferase 2 | ENSG00000085871 | ENST00000265498 | ENSP00000265498 | 113 |
| | | | ENST00000503816 | ENSP00000423008 | 114 |
| | | | ENST00000506797 | ENSP00000424278 | 115 |
| | | | ENST00000616265 | ENSP00000482639 | 116 |
| ACOX3 | Peroxisomal acyl- coenzyme A oxidase 3 | ENSG00000087008 | ENST00000514423 | ENSP00000427321 | 117 |
| ANKRD10 | Ankyrin repeat domain- containing protein 10 | ENSG00000088448 | ENST00000603993 | ENSP00000474638 | 118 |
| FKBP1A | Peptidyl-prolyl cis-trans isomerase FKBP1A | ENSG00000088832 | ENST00000612074 | ENSP00000480846 | 119 |
| | | | ENST00000614856 | ENSP00000482758 | 120 |
| | | | ENST00000618612 | ENSP00000478093 | 121 |
| SIRPG | Signal-regulatory protein gamma | ENSG00000089012 | ENST00000216927 | ENSP00000216927 | 122 |
| | | | ENST00000303415 | ENSP00000305529 | 123 |
| | | | ENST00000344103 | ENSP00000342759 | 124 |
| | | | ENST00000381580 | ENSP00000370992 | 125 |
| | | | ENST00000381583 | ENSP00000370995 | 126 |
| WHRN | Whirlin | ENSG00000095397 | ENST00000374059 | ENSP00000363172 | 127 |
| CENPM | Centromere protein M | ENSG00000100162 | ENST00000215980 | ENSP00000215980 | 128 |
| | | | ENST00000402338 | ENSP00000384731 | 129 |
| | | | ENST00000402420 | ENSP00000384132 | 130 |
| | | | ENST00000404067 | ENSP00000384814 | 131 |
| | | | ENST00000407253 | ENSP00000384743 | 132 |
| NCF4 | Neutrophil cytosol factor 4 | ENSG00000100365 | ENST00000447071 | ENSP00000414958 | 133 |
| CSF2RB | Cytokine receptor common subunit beta | ENSG00000100368 | ENST00000262825 | ENSP00000262825 | 134 |
| | | | ENST00000403662 | ENSP00000384053 | 135 |
| | | | ENST00000406230 | ENSP00000385271 | 136 |
| | | | ENST00000421539 | ENSP00000393585 | 137 |
| CNIH1 | Protein cornichon homolog 1 | ENSG00000100528 | ENST00000216416 | ENSP00000216416 | 138 |
| | | | ENST00000395573 | ENSP00000378940 | 139 |
| | | | ENST00000553660 | ENSP00000452457 | 140 |
| | | | ENST00000554683 | ENSP00000452466 | 141 |
| | | | ENST00000556113 | ENSP00000451142 | 142 |
| | | | ENST00000557659 | ENSP00000451640 | 143 |
| | | | ENST00000557690 | ENSP00000451852 | 144 |
| PIGU | Phosphatidylinositol glycan anchor | ENSG00000101464 | ENST00000217446 | ENSP00000217446 | 145 |
| | biosynthesis class U protein | | ENST00000374820 | ENSP00000363953 | 146 |
| | | | ENST00000438215 | ENSP00000395755 | 147 |
| NDFIP2 | NEDD4 family- interacting protein 2 | ENSG00000102471 | ENST00000218652 | ENSP00000218652 | 148 |
| | | | ENST00000487865 | ENSP00000419200 | 149 |
| | | | ENST00000612570 | ENSP00000480798 | 150 |
| | | | ENST00000620924 | ENSP00000480881 | 151 |
| ACP5 | Tartrate-resistant acid phosphatase type 5 | ENSG00000102575 | ENST00000218758 | ENSP00000218758 | 152 |
| | | | ENST00000412435 | ENSP00000392374 | 153 |
| | | | ENST00000433365 | ENSP00000413456 | 154 |
| | | | ENST00000589792 | ENSP00000468685 | 155 |
| | | | ENST00000590420 | ENSP00000468509 | 156 |
| | | | ENST00000590832 | ENSP00000465127 | 157 |
| | | | ENST00000591319 | ENSP00000464831 | 158 |
| | | | ENST00000592828 | ENSP00000468767 | 159 |
| NFAT5 | Nuclear factor of activated | ENSG00000102908 | ENST00000567990 | ENSP00000455115 | 160 |
| | T-cells 5 | | | | |
| CYB5B | Cytochrome b5 type B | ENSG00000103018 | ENST00000307892 | ENSP00000308430 | 161 |
| | | | ENST00000512062 | ENSP00000423679 | 162 |
| | | | ENST00000568237 | ENSP00000464102 | 163 |
| LAPTM4B | Lysosomal-associated transmembrane | ENSG00000104341 | ENST00000445593 | ENSP00000402301 | 164 |
| | protein 4B | | ENST00000517924 | ENSP00000429868 | 165 |
| | | | ENST00000521545 | ENSP00000428409 | 166 |
| | | | ENST00000619747 | ENSP00000482533 | 167 |
| IL7 | Interleukin-7 | ENSG00000104432 | ENST00000263851 | ENSP00000263851 | 168 |
| | | | ENST00000379113 | ENSP00000368408 | 169 |
| | | | ENST00000518982 | ENSP00000430272 | 170 |
| | | | ENST00000520215 | ENSP00000428364 | 171 |
| | | | ENST00000520269 | ENSP00000427750 | 172 |
| | | | ENST00000520317 | ENSP00000427800 | 173 |
| | | | ENST00000541183 | ENSP00000438922 | 174 |
| EBI3 | Interleukin-27 subunit beta | ENSG00000105246 | ENST00000221847 | ENSP00000221847 | 175 |
| PLA2G4C | Cytosolic phospholipase A2 gamma | ENSG00000105499 | ENST00000595161 | ENSP00000469528 | 176 |
| | | | ENST00000595487 | ENSP00000471328 | 177 |
| | | | ENST00000596352 | ENSP00000471759 | 178 |
| | | | ENST00000598488 | ENSP00000468972 | 179 |
| GLCCI1 | Glucocorticoid-induced transcript 1 | ENSG00000106415 | ENST00000430798 | ENSP00000396171 | 180 |
| | protein | | | | |
| MINPP1 | Multiple inositol polyphosphate | ENSG00000107789 | ENST00000371994 | ENSP00000361062 | 181 |
| | phosphatase 1 | | | | |
| | | | ENST00000371996 | ENSP00000361064 | 182 |
| | | | ENST00000536010 | ENSP00000437823 | 183 |
| WSB1 | WD repeat and SOCS box-containing | ENSG00000109046 | ENST00000581440 | ENSP00000462737 | 184 |
| | protein 1 | | ENST00000582208 | ENSP00000463621 | 185 |
| | | | ENST00000583193 | ENSP00000462595 | 186 |
| | | | ENST00000583742 | ENSP00000462365 | 187 |
| HTATIP2 | Oxidoreductase HTATIP2 | ENSG00000109854 | ENST00000419348 | ENSP00000392985 | 188 |
| | | | ENST00000530266 | ENSP00000436548 | 189 |
| | | | ENST00000532081 | ENSP00000432107 | 190 |
| | | | ENST00000532505 | ENSP00000432338 | 191 |
| CTSC | Dipeptidyl peptidase 1 | ENSG00000109861 | ENST00000227266 | ENSP00000227266 | 192 |
| | | | ENST00000524463 | ENSP00000432541 | 193 |
| | | | ENST00000527018 | ENSP00000432556 | 194 |
| | | | ENST00000528020 | ENSP00000433229 | 195 |
| | | | ENST00000529974 | ENSP00000433539 | 196 |
| VWA5A | von Willebrand factor A domain- | ENSG00000110002 | ENST00000392744 | ENSP00000376501 | 197 |
| | containing protein 5A | | ENST00000392748 | ENSP00000376504 | 198 |
| | | | ENST00000456829 | ENSP00000407726 | 199 |
| SLC35F2 | Solute carrier family 35 member F2 | ENSG00000110660 | ENST00000375682 | ENSP00000364834 | 200 |
| | | | ENST00000525071 | ENSP00000434307 | 201 |
| | | | ENST00000525815 | ENSP00000436785 | 202 |
| | | | ENST00000532513 | ENSP00000433783 | 203 |
| VDR | Vitamin D3 receptor | ENSG00000111424 | ENST00000547065 | ENSP00000449074 | 204 |
| SEC24A | Protein transport protein Sec24A | ENSG00000113615 | ENST00000398844 | ENSP00000381823 | 205 |
| IL1R2 | Interleukin-1 receptor type 2 | ENSG00000115590 | ENST00000332549 | ENSP00000330959 | 206 |
| | | | ENST00000393414 | ENSP00000377066 | 207 |
| | | | ENST00000441002 | ENSP00000414611 | 208 |
| | | | ENST00000457817 | ENSP00000408415 | 209 |
| IL1R1 | Interleukin-1 receptor type 1 | ENSG00000115594 | ENST00000409288 | ENSP00000386478 | 210 |
| | | | ENST00000409329 | ENSP00000387131 | 211 |
| | | | ENST00000409589 | ENSP00000386555 | 212 |
| | | | ENST00000409929 | ENSP00000386776 | 213 |
| | | | ENST00000410023 | ENSP00000386380 | 214 |
| | | | ENST00000413623 | ENSP00000407017 | 215 |
| | | | ENST00000422532 | ENSP00000390349 | 216 |
| | | | ENST00000424272 | ENSP00000415366 | 217 |
| | | | ENST00000428279 | ENSP00000410461 | 218 |
| | | | ENST00000430171 | ENSP00000408101 | 219 |
| | | | ENST00000442590 | ENSP00000393296 | 220 |
| | | | ENST00000450319 | ENSP00000411627 | 221 |
| | | | ENST00000452403 | ENSP00000401646 | 222 |
| IL1RL2 | Interleukin-1 receptor- like 2 | ENSG00000115598 | ENST00000264257 | ENSP00000264257 | 223 |
| | | | ENST00000421464 | ENSP00000387611 | 224 |
| | | | ENST00000441515 | ENSP00000413348 | 225 |
| IL1RL1 | Interleukin-1 receptor- like 1 | ENSG00000115602 | ENST00000233954 | ENSP00000233954 | 226 |
| | | | ENST00000311734 | ENSP00000310371 | 227 |
| | | | ENST00000404917 | ENSP00000384822 | 228 |
| | | | ENST00000409584 | ENSP00000386618 | 229 |
| | | | ENST00000427077 | ENSP00000391120 | 230 |
| | | | ENST00000447231 | ENSP00000409437 | 231 |
| UXS1 | UDP-glucuronic acid decarboxylase 1 | ENSG00000115652 | ENST00000283148 | ENSP00000283148 | 232 |
| | | | ENST00000409501 | ENSP00000387019 | 233 |
| | | | ENST00000441952 | ENSP00000416656 | 234 |
| | | | ENST00000457835 | ENSP00000399316 | 235 |
| SLC25A12 | Calcium-binding mitochondrial | ENSG00000115840 | ENST00000426896 | ENSP00000413968 | 236 |
| | carrier protein Aralar1 | | | | |
| THADA | Thyroid adenoma- associated protein | ENSG00000115970 | ENST00000403856 | ENSP00000385469 | 237 |
| LEPR | Leptin receptor | ENSG00000116678 | ENST00000344610 | ENSP00000340884 | 238 |
| | | | ENST00000349533 | ENSP00000330393 | 239 |
| | | | ENST00000371058 | ENSP00000360097 | 240 |
| | | | ENST00000371059 | ENSP00000360098 | 241 |
| | | | ENST00000371060 | ENSP00000360099 | 242 |
| | | | ENST00000406510 | ENSP00000384025 | 243 |
| | | | ENST00000616738 | ENSP00000483390 | 244 |
| MREG | Melanoregulin | ENSG00000118242 | ENST00000263268 | ENSP00000263268 | 245 |
| | | | ENST00000620139 | ENSP00000484331 | 246 |
| FLVCR2 | Feline leukemia virus subgroup C | ENSG00000119686 | ENST00000238667 | ENSP00000238667 | 247 |
| | receptor- related protein 2 | | ENST00000539311 | ENSP00000443439 | 248 |
| | | | ENST00000553341 | ENSP00000452584 | 249 |
| | | | ENST00000553587 | ENSP00000451603 | 250 |
| | | | ENST00000554580 | ENSP00000451781 | 251 |
| | | | ENST00000555027 | ENSP00000452453 | 252 |
| | | | ENST00000555058 | ENSP00000451104 | 253 |
| | | | ENST00000556856 | ENSP00000452468 | 254 |
| SOCS2 | Suppressor of cytokine signaling 2 | ENSG00000120833 | ENST00000548537 | ENSP00000448709 | 255 |
| | | | ENST00000549510 | ENSP00000474888 | 256 |
| RDH10 | Retinol dehydrogenase 10 | ENSG00000121039 | ENST00000240285 | ENSP00000240285 | 257 |
| | | | ENST00000519380 | ENSP00000428132 | 258 |
| | | | ENST00000521928 | ENSP00000429727 | 259 |
| LAX1 | Lymphocyte transmembrane adapter 1 | ENSG00000122188 | ENST00000367217 | ENSP00000356186 | 260 |
| | | | ENST00000442561 | ENSP00000406970 | 261 |
| ZWINT | ZW10 interactor | ENSG00000122952 | ENST00000489649 | ENSP00000473330 | 262 |
| ACOT9 | Acyl-coenzyme A thioesterase 9, | ENSG00000123130 | ENST00000336430 | ENSP00000336580 | 263 |
| | mitochondrial | | | | |
| | | | ENST00000379303 | ENSP00000368605 | 264 |
| | | | ENST00000494361 | ENSP00000420238 | 265 |
| TM9SF2 | Transmembrane 9 superfamily member 2 | ENSG00000125304 | ENST00000376387 | ENSP00000365567 | 266 |
| HS3ST3B1 | Heparan sulfate glucosamine3-O- | ENSG00000125430 | ENST00000360954 | ENSP00000354213 | 267 |
| | sulfotransferase 3B1 | | ENST00000466596 | ENSP00000436078 | 268 |
| EML2 | Echinoderm microtubule-associated protein-like 2 | ENSG00000125746 | ENST00000245925 | ENSP00000245925 | 269 |
| | | | ENST00000586195 | ENSP00000465339 | 270 |
| | | | ENST00000586405 | ENSP00000465885 | 271 |
| | | | ENST00000586770 | ENSP00000465786 | 272 |
| | | | ENST00000587152 | ENSP00000468312 | 273 |
| | | | ENST00000587484 | ENSP00000465994 | 274 |
| | | | ENST00000588272 | ENSP00000466100 | 275 |
| | | | ENST00000588308 | ENSP00000468329 | 276 |
| | | | ENST00000589876 | ENSP00000464789 | 277 |
| | | | ENST00000590018 | ENSP00000468373 | 278 |
| | | | ENST00000590043 | ENSP00000464804 | 279 |
| | | | ENST00000590819 | ENSP00000464950 | 280 |
| | | | ENST00000591721 | ENSP00000468470 | 281 |
| | | | ENST00000592853 | ENSP00000468383 | 282 |
| | | | ENST00000593255 | ENSP00000467941 | 283 |
| MGME1 | Mitochondrial genome maintenance | ENSG00000125871 | ENST00000377704 | ENSP00000366933 | 284 |
| | exonuclease 1 | | | | |
| | | | ENST00000377709 | ENSP00000366938 | 285 |
| | | | ENST00000377710 | ENSP00000366939 | 286 |
| IGFLR1 | IGF-like family receptor 1 | ENSG00000126246 | ENST00000246532 | ENSP00000246532 | 287 |
| | | | ENST00000588018 | ENSP00000468545 | 288 |
| | | | ENST00000588992 | ENSP00000465962 | 289 |
| | | | ENST00000591277 | ENSP00000468644 | 290 |
| | | | ENST00000591748 | ENSP00000476009 | 291 |
| | | | ENST00000592537 | ENSP00000466181 | 292 |
| | | | ENST00000592693 | ENSP00000474913 | 293 |
| | | | ENST00000592889 | ENSP00000467750 | 294 |
| MYO5C | Unconventional myosin- Vc | ENSG00000128833 | ENST00000261839 | ENSP00000261839 | 295 |
| ITFG1 | T-cell immunomodulatory protein | ENSG00000129636 | ENST00000320640 | ENSP00000319918 | 296 |
| | | | ENST00000544001 | ENSP00000441062 | 297 |
| | | | ENST00000563730 | ENSP00000455630 | 298 |
| | | | ENST00000565262 | ENSP00000457665 | 299 |
| | | | ENST00000565940 | ENSP00000459192 | 300 |
| SYT11 | Synaptotagmin-11 | ENSG00000132718 | ENST00000368324 | ENSP00000357307 | 301 |
| SLC41A1 | Solute carrier family 41 member 1 | ENSG00000133065 | ENST00000367137 | ENSP00000356105 | 302 |
| ATP13A3 | Probable cation- transporting ATPase 13A3 | ENSG00000133657 | ENST00000256031 | ENSP00000256031 | 303 |
| | | | ENST00000429136 | ENSP00000402550 | 304 |
| | | | ENST00000439040 | ENSP00000416508 | 305 |
| | | | ENST00000446356 | ENSP00000410767 | 306 |
| | | | ENST00000457986 | ENSP00000406234 | 307 |
| | | | ENST00000619199 | ENSP00000482200 | 308 |
| MICAL2 | Protein-methionine sulfoxide | ENSG00000133816 | ENST00000379612 | ENSP00000368932 | 309 |
| | oxidase MICAL2 | | | | |
| CABLES1 | CDK5 and ABL1 enzyme substrate 1 | ENSG00000134508 | ENST00000256925 | ENSP00000256925 | 310 |
| | | | ENST00000579963 | ENSP00000464435 | 311 |
| HAVCR2 | Hepatitis A virus cellular receptor 2 | ENSG00000135077 | ENST00000307851 | ENSP00000312002 | 312 |
| | | | ENST00000522593 | ENSP00000430873 | 313 |
| CGA | Chromogranin-A | ENSG00000135346 | ENST00000369582 | ENSP00000358595 | 314 |
| | | | ENST00000610310 | ENSP00000482232 | 315 |
| | | | ENST00000625577 | ENSP00000486666 | 316 |
| | | | ENST00000627148 | ENSP00000486024 | 317 |
| | | | ENST00000630630 | ENSP00000487300 | 318 |
| FAIM2 | Protein lifeguard 2 | ENSG00000135472 | ENST00000320634 | ENSP00000321951 | 319 |
| | | | ENST00000547871 | ENSP00000449360 | 320 |
| | | | ENST00000550195 | ENSP00000447715 | 321 |
| | | | ENST00000550635 | ENSP00000449711 | 322 |
| | | | ENST00000550890 | ENSP00000450132 | 323 |
| | | | ENST00000552669 | ENSP00000446771 | 324 |
| | | | ENST00000552863 | ENSP00000449957 | 325 |
| ARHGEF4 | Rho guanine nucleotide exchange | ENSG00000136002 | ENST00000392953 | ENSP00000376680 | 326 |
| | factor 4 | | | | |
| SLC41A2 | Solute carrier family 41 member 2 | ENSG00000136052 | ENST00000258538 | ENSP00000258538 | 327 |
| | | | ENST00000437220 | ENSP00000391377 | 328 |
| NUSAP1 | Nucleolar and spindle- associated | ENSG00000137804 | ENST00000557840 | ENSP00000453428 | 329 |
| | protein 1 | | ENST00000559046 | ENSP00000452725 | 330 |
| ADAM10 | Disintegrin and metalloproteinase | ENSG00000137845 | ENST00000260408 | ENSP00000260408 | 331 |
| | domain-containing protein 10 | | ENST00000396136 | ENSP00000456542 | 332 |
| | | | ENST00000402627 | ENSP00000386056 | 333 |
| | | | ENST00000439637 | ENSP00000391930 | 334 |
| | | | ENST00000461408 | ENSP00000481779 | 335 |
| | | | ENST00000558004 | ENSP00000452704 | 336 |
| | | | ENST00000559053 | ENSP00000453952 | 337 |
| | | | ENST00000561288 | ENSP00000452639 | 338 |
| HADHB | Trifunctional enzyme subunit beta, | ENSG00000138029 | ENST00000545822 | ENSP00000442665 | 339 |
| | mitochondrial | | | | |
| CD27 | CD27 antigen | ENSG00000139193 | ENST00000266557 | ENSP00000266557 | 340 |
| CDH24 | Cadherin-24 | ENSG00000139880 | ENST00000267383 | ENSP00000267383 | 341 |
| | | | ENST00000397359 | ENSP00000380517 | 342 |
| | | | ENST00000487137 | ENSP00000434821 | 343 |
| | | | ENST00000554034 | ENSP00000452493 | 344 |
| | | | ENST00000610348 | ENSP00000478078 | 345 |
| ETFA | Electron transfer flavoprotein | ENSG00000140374 | ENST00000560044 | ENSP00000452942 | 346 |
| | subunit alpha, mitochondrial | | ENST00000560309 | ENSP00000453753 | 347 |
| KSR1 | Kinase suppressor of Ras 1 | ENSG00000141068 | ENST00000580163 | ENSP00000463204 | 348 |
| SECTM1 | Secreted and transmembrane protein 1 | ENSG00000141574 | ENST00000269389 | ENSP00000269389 | 349 |
| | | | ENST00000580437 | ENSP00000463904 | 350 |
| | | | ENST00000581691 | ENSP00000463114 | 351 |
| | | | ENST00000581864 | ENSP00000464111 | 352 |
| | | | ENST00000581954 | ENSP00000464385 | 353 |
| | | | ENST00000582290 | ENSP00000462294 | 354 |
| | | | ENST00000582563 | ENSP00000463120 | 355 |
| | | | ENST00000583093 | ENSP00000462563 | 356 |
| EVA1B | Protein eva-1 homolog B | ENSG00000142694 | ENST00000270824 | ENSP00000270824 | 357 |
| CTTNBP2NL | CTTNBP2 N-terminal-like protein | ENSG00000143079 | ENST00000271277 | ENSP00000271277 | 358 |
| | | | ENST00000441739 | ENSP00000390976 | 359 |
| CASQ1 | Calsequestrin-1 | ENSG00000143318 | ENST00000368078 | ENSP00000357057 | 360 |
| ARL6IP5 | PRA1 family protein 3 | ENSG00000144746 | ENST00000273258 | ENSP00000273258 | 361 |
| | | | ENST00000478935 | ENSP00000420138 | 362 |
| | | | ENST00000484921 | ENSP00000419374 | 363 |
| | | | ENST00000485444 | ENSP00000419021 | 364 |
| ADPRH | [Protein ADP- ribosylarginine] | ENSG00000144843 | ENST00000357003 | ENSP00000349496 | 365 |
| | hydrolase | | ENST00000465513 | ENSP00000417430 | 366 |
| | | | ENST00000478399 | ENSP00000420200 | 367 |
| | | | ENST00000478927 | ENSP00000417528 | 368 |
| | | | ENST00000481816 | ENSP00000419703 | 369 |
| PAM | Peptidyl-glycine alpha- | ENSG00000145730 | ENST00000304400 | ENSP00000306100 | 370 |
| | amidating monooxygenase | | ENST00000345721 | ENSP00000302544 | 371 |
| | | | ENST00000346918 | ENSP00000282992 | 372 |
| | | | ENST00000348126 | ENSP00000314638 | 373 |
| | | | ENST00000438793 | ENSP00000396493 | 374 |
| | | | ENST00000455264 | ENSP00000403461 | 375 |
| | | | ENST00000504691 | ENSP00000424203 | 376 |
| | | | ENST00000505654 | ENSP00000421569 | 377 |
| | | | ENST00000506006 | ENSP00000423611 | 378 |
| | | | ENST00000509832 | ENSP00000423763 | 379 |
| | | | ENST00000511477 | ENSP00000421823 | 380 |
| | | | ENST00000511839 | ENSP00000426448 | 381 |
| | | | ENST00000512073 | ENSP00000420851 | 382 |
| RNF145 | RING finger protein 145 | ENSG00000145860 | ENST00000274542 | ENSP00000274542 | 383 |
| | | | ENST00000424310 | ENSP00000409064 | 384 |
| | | | ENST00000518802 | ENSP00000430955 | 385 |
| | | | ENST00000519865 | ENSP00000430397 | 386 |
| | | | ENST00000520638 | ENSP00000429071 | 387 |
| | | | ENST00000521606 | ENSP00000430753 | 388 |
| | | | ENST00000611185 | ENSP00000482720 | 389 |
| TMEM140 | Transmembrane protein 140 | ENSG00000146859 | ENST00000275767 | ENSP00000275767 | 390 |
| CHST7 | Carbohydrate sulfotransferase 7 | ENSG00000147119 | ENST00000276055 | ENSP00000276055 | 391 |
| CHRNA6 | Neuronal acetylcholine receptor | ENSG00000147434 | ENST00000276410 | ENSP00000276410 | 392 |
| | subunit alpha-6 | | ENST00000533810 | ENSP00000434659 | 393 |
| | | | ENST00000534622 | ENSP00000433871 | 394 |
| PTPRJ | Receptor-type tyrosine- protein | ENSG00000149177 | ENST00000418331 | ENSP00000400010 | 395 |
| | phosphatase eta | | ENST00000440289 | ENSP00000409733 | 396 |
| | | | ENST00000527952 | ENSP00000435618 | 397 |
| | | | ENST00000534219 | ENSP00000432686 | 398 |
| | | | ENST00000613246 | ENSP00000477933 | 399 |
| | | | ENST00000615445 | ENSP00000479342 | 400 |
| NCAM1 | Neural cell adhesion molecule 1 | ENSG00000149294 | ENST00000316851 | ENSP00000318472 | 401 |
| | | | ENST00000401611 | ENSP00000384055 | 402 |
| | | | ENST00000524916 | ENSP00000478072 | 403 |
| | | | ENST00000526322 | ENSP00000479687 | 404 |
| | | | ENST00000528158 | ENSP00000486241 | 405 |
| | | | ENST00000528590 | ENSP00000480269 | 406 |
| | | | ENST00000529356 | ENSP00000482205 | 407 |
| | | | ENST00000531044 | ENSP00000484943 | 408 |
| | | | ENST00000531817 | ENSP00000475074 | 409 |
| | | | ENST00000533073 | ENSP00000486406 | 410 |
| | | | ENST00000613217 | ENSP00000479353 | 411 |
| | | | ENST00000615112 | ENSP00000480797 | 412 |
| | | | ENST00000615285 | ENSP00000479241 | 413 |
| | | | ENST00000618266 | ENSP00000477835 | 414 |
| | | | ENST00000619839 | ENSP00000480132 | 415 |
| | | | ENST00000620046 | ENSP00000482852 | 416 |
| | | | ENST00000621128 | ENSP00000481083 | 417 |
| | | | ENST00000621518 | ENSP00000477808 | 418 |
| | | | ENST00000621850 | ENSP00000480774 | 419 |
| INPP1 | Inositol polyphosphate 1-phosphatase | ENSG00000151689 | ENST00000413239 | ENSP00000391415 | 420 |
| | | | ENST00000444194 | ENSP00000404732 | 421 |
| | | | ENST00000451089 | ENSP00000410662 | 422 |
| | | | ENST00000458193 | ENSP00000412119 | 423 |
| JAKMIP1 | Janus kinase and microtubule-interacting | ENSG00000152969 | ENST00000409021 | ENSP00000386711 | 424 |
| | protein 1 | | ENST00000409371 | ENSP00000387042 | 425 |
| RHOC | Rho-related GTP-binding protein | ENSG00000155366 | ENST00000468093 | ENSP00000431392 | 426 |
| | RhoC | | ENST00000484280 | ENSP00000434310 | 427 |
| | | | ENST00000528831 | ENSP00000432209 | 428 |
| SLC16A1 | Monocarboxylate transporter 1 | ENSG00000155380 | ENST00000369626 | ENSP00000358640 | 429 |
| | | | ENST00000429288 | ENSP00000397106 | 430 |
| | | | ENST00000443580 | ENSP00000399104 | 431 |
| | | | ENST00000458229 | ENSP00000416167 | 432 |
| | | | ENST00000538576 | ENSP00000441065 | 433 |
| CXCL13 | C-X-C motif chemokine 13 | ENSG00000156234 | ENST00000286758 | ENSP00000286758 | 434 |
| SH3RF2 | Putative E3 ubiquitin- protein | ENSG00000156463 | ENST00000359120 | ENSP00000352028 | 435 |
| | ligase SH3RF2 | | ENST00000511217 | ENSP00000424497 | 436 |
| NPTN | Neuroplastin | ENSG00000156642 | ENST00000345330 | ENSP00000290401 | 437 |
| | | | ENST00000351217 | ENSP00000342958 | 438 |
| | | | ENST00000562924 | ENSP00000456349 | 439 |
| | | | ENST00000563691 | ENSP00000457028 | 440 |
| | | | ENST00000565325 | ENSP00000457470 | 441 |
| AHCYL2 | Adenosylhomocysteinase 3 | ENSG00000158467 | ENST00000466924 | ENSP00000419346 | 442 |
| PTGIR | Prostacyclin receptor | ENSG00000160013 | ENST00000291294 | ENSP00000291294 | 443 |
| | | | ENST00000594275 | ENSP00000469408 | 444 |
| | | | ENST00000596260 | ENSP00000468970 | 445 |
| | | | ENST00000597185 | ENSP00000470566 | 446 |
| | | | ENST00000598865 | ENSP00000470799 | 447 |
| TMPRSS3 | Transmembrane protease | ENSG00000160183 | ENST00000291532 | ENSP00000291532 | 448 |
| | serine 4 | | ENST00000398397 | ENSP00000381434 | 449 |
| | | | ENST00000398405 | ENSP00000381442 | 450 |
| | | | ENST00000433957 | ENSP00000411013 | 451 |
| FCRL3 | Fc receptor-like protein 3 | ENSG00000160856 | ENST00000368184 | ENSP00000357167 | 452 |
| | | | ENST00000368186 | ENSP00000357169 | 453 |
| | | | ENST00000477837 | ENSP00000433430 | 454 |
| | | | ENST00000485028 | ENSP00000434331 | 455 |
| | | | ENST00000492769 | ENSP00000435487 | 456 |
| | | | ENST00000496769 | ENSP00000473680 | 457 |
| PAQR4 | Progestin and adipoQ receptor | ENSG00000162073 | ENST00000293978 | ENSP00000293978 | 458 |
| | family member 4 | | ENST00000318782 | ENSP00000321804 | 459 |
| | | | ENST00000572687 | ENSP00000459418 | 460 |
| | | | ENST00000574988 | ENSP00000458683 | 461 |
| | | | ENST00000576565 | ENSP00000460326 | 462 |
| ZG16B | Zymogen granule protein 16 homolog B | ENSG00000162078 | ENST00000382280 | ENSP00000371715 | 463 |
| | | | ENST00000570670 | ENSP00000460793 | 464 |
| | | | ENST00000571723 | ENSP00000458847 | 465 |
| | | | ENST00000572863 | ENSP00000461740 | 466 |
| SGPP2 | Sphingosine-1-phosphate phosphatase 2 | ENSG00000163082 | ENST00000321276 | ENSP00000315137 | 467 |
| NEURL3 | E3 ubiquitin-protein ligase NEURL1B | ENSG00000163121 | ENST00000310865 | ENSP00000479456 | 468 |
| | | | ENST00000435380 | ENSP00000480933 | 469 |
| KIF15 | Kinesin-like protein KIF15 | ENSG00000163808 | ENST00000438321 | ENSP00000406939 | 470 |
| TMEM184C | Transmembrane protein 184C | ENSG00000164168 | ENST00000296582 | ENSP00000296582 | 471 |
| | | | ENST00000505999 | ENSP00000421159 | 472 |
| | | | ENST00000508208 | ENSP00000425940 | 473 |
| C5ORF63 | Glutaredoxin-like protein C5orf63 | ENSG00000164241 | ENST00000296662 | ENSP00000453964 | 474 |
| | | | ENST00000508527 | ENSP00000475157 | 475 |
| | | | ENST00000509733 | ENSP00000475415 | 476 |
| | | | ENST00000535381 | ENSP00000454153 | 477 |
| | | | ENST00000606042 | ENSP00000475733 | 478 |
| | | | ENST00000606937 | ENSP00000475810 | 479 |
| | | | ENST00000607731 | ENSP00000476160 | 480 |
| MELK | Maternal embryonic leucine | ENSG00000165304 | ENST00000495529 | ENSP00000487536 | 481 |
| | zipper kinase | | ENST00000536329 | ENSP00000443550 | 482 |
| | | | ENST00000536987 | ENSP00000439184 | 483 |
| | | | ENST00000543751 | ENSP00000441596 | 484 |
| | | | ENST00000626154 | ENSP00000486558 | 485 |
| FAAH2 | Fatty-acid amide hydrolase 2 | ENSG00000165591 | ENST00000374900 | ENSP00000364035 | 486 |
| TPP1 | Alpha-tocopherol transfer protein | ENSG00000166340 | ENST00000299427 | ENSP00000299427 | 487 |
| | | | ENST00000436873 | ENSP00000398136 | 488 |
| | | | ENST00000528571 | ENSP00000434647 | 489 |
| | | | ENST00000528657 | ENSP00000435001 | 490 |
| CX3CR1 | CX3C chemokine receptor 1 | ENSG00000168329 | ENST00000358309 | ENSP00000351059 | 491 |
| | | | ENST00000399220 | ENSP00000382166 | 492 |
| | | | ENST00000412814 | ENSP00000408835 | 493 |
| | | | ENST00000435290 | ENSP00000394960 | 494 |
| | | | ENST00000541347 | ENSP00000439140 | 495 |
| | | | ENST00000542107 | ENSP00000444928 | 496 |
| TSPAN5 | Tetraspanin-5 | ENSG00000168785 | ENST00000305798 | ENSP00000307701 | 497 |
| | | | ENST00000505184 | ENSP00000423916 | 498 |
| | | | ENST00000508798 | ENSP00000421808 | 499 |
| | | | ENST00000511651 | ENSP00000426248 | 500 |
| | | | ENST00000511800 | ENSP00000422548 | 501 |
| | | | ENST00000515287 | ENSP00000423504 | 502 |
| | | | ENST00000515440 | ENSP00000422351 | 503 |
| UGP2 | UTP-glucose-1-phosphate | ENSG00000169764 | ENST00000467999 | ENSP00000418642 | 504 |
| | uridylyltransferase | | ENST00000496334 | ENSP00000420760 | 505 |
| GLB1 | Beta-galactosidase | ENSG00000170266 | ENST00000307363 | ENSP00000306920 | 506 |
| | | | ENST00000307377 | ENSP00000305920 | 507 |
| | | | ENST00000399402 | ENSP00000382333 | 508 |
| | | | ENST00000415454 | ENSP00000411813 | 509 |
| | | | ENST00000436768 | ENSP00000387989 | 510 |
| | | | ENST00000438227 | ENSP00000401250 | 511 |
| | | | ENST00000440656 | ENSP00000411769 | 512 |
| | | | ENST00000446732 | ENSP00000407365 | 513 |
| | | | ENST00000450835 | ENSP00000403264 | 514 |
| SPATA24 | Spermatogenesis- associated | ENSG00000170469 | ENST00000514983 | ENSP00000423424 | 515 |
| | protein 24 | | | | |
| RBKS | Ribokinase | ENSG00000171174 | ENST00000449378 | ENSP00000413789 | 516 |
| NETO2 | Neuropilin and tolloid- like | ENSG00000171208 | ENST00000303155 | ENSP00000306726 | 517 |
| | protein 2 | | ENST00000562435 | ENSP00000455169 | 518 |
| | | | ENST00000562559 | ENSP00000454213 | 519 |
| | | | ENST00000563078 | ENSP00000456818 | 520 |
| | | | ENST00000564667 | ENSP00000457133 | 521 |
| LRG1 | Leucine-rich alpha-2-glycoprotein | ENSG00000171236 | ENST00000306390 | ENSP00000302621 | 522 |
| FAM98B | Protein FAM98B | ENSG00000171262 | ENST00000491535 | ENSP00000453166 | 523 |
| | | | ENST00000559431 | ENSP00000453926 | 524 |
| CHST11 | Carbohydrate sulfotransferase 11 | ENSG00000171310 | ENST00000303694 | ENSP00000305725 | 525 |
| | | | ENST00000546689 | ENSP00000448678 | 526 |
| | | | ENST00000547956 | ENSP00000449093 | 527 |
| | | | ENST00000549260 | ENSP00000450004 | 528 |
| ECEL1 | Endothelin-converting enzyme-like 1 | ENSG00000171551 | ENST00000304546 | ENSP00000302051 | 529 |
| | | | ENST00000409941 | ENSP00000386333 | 530 |
| BCL2L1 | Bcl-2-like protein 1 | ENSG00000171552 | ENST00000307677 | ENSP00000302564 | 531 |
| | | | ENST00000376055 | ENSP00000365223 | 532 |
| | | | ENST00000376062 | ENSP00000365230 | 533 |
| MALT1 | Mucosa-associated lymphoid | ENSG00000172175 | ENST00000345724 | ENSP00000304161 | 534 |
| | tissue | | ENST00000348428 | ENSP00000319279 | 535 |
| | lymphoma translocation protein 1 | | ENST00000591792 | ENSP00000467222 | 536 |
| CYP7B1 | 25-hydroxycholesterol 7- | ENSG00000172817 | ENST00000310193 | ENSP00000310721 | 537 |
| | alpha-hydroxylase | | | | |
| HPSE | Heparanase | ENSG00000173083 | ENST00000311412 | ENSP00000308107 | 538 |
| | | | ENST00000405413 | ENSP00000384262 | 539 |
| | | | ENST00000507150 | ENSP00000426139 | 540 |
| | | | ENST00000508891 | ENSP00000421827 | 541 |
| | | | ENST00000509906 | ENSP00000421038 | 542 |
| | | | ENST00000512196 | ENSP00000423265 | 543 |
| | | | ENST00000513463 | ENSP00000421365 | 544 |
| VANGL1 | Vang-like protein 1 | ENSG00000173218 | ENST00000310260 | ENSP00000310800 | 545 |
| | | | ENST00000355485 | ENSP00000347672 | 546 |
| | | | ENST00000369509 | ENSP00000358522 | 547 |
| | | | ENST00000369510 | ENSP00000358523 | 548 |
| CD7 | T-cell antigen CD7 | ENSG00000173762 | ENST00000312648 | ENSP00000312027 | 549 |
| | | | ENST00000578509 | ENSP00000464565 | 550 |
| | | | ENST00000581434 | ENSP00000464546 | 551 |
| | | | ENST00000582480 | ENSP00000464182 | 552 |
| | | | ENST00000583376 | ENSP00000463489 | 553 |
| | | | ENST00000584284 | ENSP00000463612 | 554 |
| HAP1 | Huntingtin-associated protein 1 | ENSG00000173805 | ENST00000455021 | ENSP00000397242 | 555 |
| FBXO45 | F-box/SPRY domain-containing | ENSG00000174013 | ENST00000440469 | ENSP00000389868 | 556 |
| | protein 1 | | | | |
| CHST2 | Carbohydrate sulfotransferase 2 | ENSG00000175040 | ENST00000309575 | ENSP00000307911 | 557 |
| RMI2 | RecQ-mediated genome instability | ENSG00000175643 | ENST00000572173 | ENSP00000461206 | 558 |
| | protein 2 | | | | |
| SLC35E3 | Solute carrier family 35 member E3 | ENSG00000175782 | ENST00000398004 | ENSP00000381089 | 559 |
| | | | ENST00000431174 | ENSP00000403769 | 560 |
| ZBTB38 | Zinc finger and BTB domain- | ENSG00000177311 | ENST00000503809 | ENSP00000422051 | 561 |
| | containing protein 38 | | | | |
| YIPF6 | Protein YIPF6 | ENSG00000181704 | ENST00000374622 | ENSP00000363751 | 562 |
| | | | ENST00000451537 | ENSP00000401799 | 563 |
| | | | ENST00000462683 | ENSP00000417573 | 564 |
| CREB3L2 | Cyclic AMP-responsive element- | ENSG00000182158 | ENST00000330387 | ENSP00000329140 | 565 |
| | binding protein 3-like protein 2 | | ENST00000420629 | ENSP00000402889 | 566 |
| | | | ENST00000456390 | ENSP00000403550 | 567 |
| XKRX | XK-related protein 2 | ENSG00000182489 | ENST00000372956 | ENSP00000362047 | 568 |
| | | | ENST00000468904 | ENSP00000419884 | 569 |
| CADM1 | Cell adhesion molecule 1 | ENSG00000182985 | ENST00000331581 | ENSP00000329797 | 570 |
| | | | ENST00000452722 | ENSP00000395359 | 571 |
| | | | ENST00000536727 | ENSP00000440322 | 572 |
| | | | ENST00000537058 | ENSP00000439817 | 573 |
| | | | ENST00000540951 | ENSP00000445375 | 574 |
| | | | ENST00000542447 | ENSP00000439176 | 575 |
| | | | ENST00000542450 | ENSP00000442001 | 576 |
| | | | ENST00000543540 | ENSP00000439847 | 577 |
| | | | ENST00000545380 | ENSP00000442387 | 578 |
| | | | ENST00000612235 | ENSP00000483648 | 579 |
| | | | ENST00000612471 | ENSP00000483793 | 580 |
| | | | ENST00000616271 | ENSP00000484516 | 581 |
| | | | ENST00000621043 | ENSP00000482840 | 582 |
| | | | ENST00000621709 | ENSP00000482924 | 583 |
| LHFP | Lipoma HMGIC fusion partner | ENSG00000183722 | ENST00000379589 | ENSP00000368908 | 584 |
| CSF1 | Macrophage colony- stimulating | ENSG00000184371 | ENST00000329608 | ENSP00000327513 | 585 |
| | factor 1 | | ENST00000357302 | ENSP00000349854 | 586 |
| | | | ENST00000369801 | ENSP00000358816 | 587 |
| | | | ENST00000369802 | ENSP00000358817 | 588 |
| | | | ENST00000420111 | ENSP00000407317 | 589 |
| | | | ENST00000488198 | ENSP00000433837 | 590 |
| | | | ENST00000525659 | ENSP00000431547 | 591 |
| | | | ENST00000527192 | ENSP00000434527 | 592 |
| PTP4A3 | Protein tyrosine phosphatase type | ENSG00000184489 | ENST00000329397 | ENSP00000332274 | 593 |
| | IVA 3 | | ENST00000349124 | ENSP00000331730 | 594 |
| | | | ENST00000520105 | ENSP00000428758 | 595 |
| | | | ENST00000521578 | ENSP00000428976 | 596 |
| | | | ENST00000523147 | ENSP00000428725 | 597 |
| | | | ENST00000524028 | ENSP00000430332 | 598 |
| OSBP2 | Oxysterol-binding protein 2 | ENSG00000184792 | ENST00000445781 | ENSP00000411497 | 599 |
| METTL7A | Methyltransferase-like protein 7A | ENSG00000185432 | ENST00000332160 | ENSP00000331787 | 600 |
| | | | ENST00000547104 | ENSP00000447542 | 601 |
| | | | ENST00000548553 | ENSP00000448785 | 602 |
| | | | ENST00000550097 | ENSP00000448286 | 603 |
| | | | ENST00000550502 | ENSP00000450239 | 604 |
| TMPRSS6 | Transmembrane protease serine 6 | ENSG00000187045 | ENST00000346753 | ENSP00000334962 | 605 |
| | | | ENST00000381792 | ENSP00000371211 | 606 |
| | | | ENST00000406725 | ENSP00000385453 | 607 |
| | | | ENST00000406856 | ENSP00000384964 | 608 |
| | | | ENST00000423761 | ENSP00000400317 | 609 |
| | | | ENST00000429068 | ENSP00000392433 | 610 |
| | | | ENST00000442782 | ENSP00000397691 | 611 |
| GCNT1 | Beta-1,3-galactosyl-O-glycosyl- | ENSG00000187210 | ENST00000376730 | ENSP00000365920 | 612 |
| | glycoprotein beta-1, | | ENST00000442371 | ENSP00000415454 | 613 |
| | 6-N-acetylglucosaminyltransferase | | ENST00000444201 | ENSP00000390703 | 614 |
| MAGEH1 | Melanoma-associated antigen H1 | ENSG00000187601 | ENST00000342972 | ENSP00000343706 | 615 |
| NEMP2 | Nuclear envelope integral membrane | ENSG00000189362 | ENST00000343105 | ENSP00000340087 | 616 |
| | protein 2 | | ENST00000409150 | ENSP00000386292 | 617 |
| | | | ENST00000414176 | ENSP00000404283 | 618 |
| | | | ENST00000421038 | ENSP00000410306 | 619 |
| | | | ENST00000444545 | ENSP00000403867 | 620 |
| NTNG2 | Netrin-G2 | ENSG00000196358 | ENST00000372179 | ENSP00000361252 | 621 |
| | | | ENST00000393229 | ENSP00000376921 | 622 |
| PDGFA | Platelet-derived growth factor | ENSG00000197461 | ENST00000354513 | ENSP00000346508 | 623 |
| | subunit A | | ENST00000400761 | ENSP00000383572 | 624 |
| | | | ENST00000402802 | ENSP00000383889 | 625 |
| | | | ENST00000405692 | ENSP00000384673 | 626 |
| PDCD1LG2 | Programmed cell death 1 ligand 2 | ENSG00000197646 | ENST00000397747 | ENSP00000380855 | 627 |
| TOR4A | Torsin-4A | ENSG00000198113 | ENST00000357503 | ENSP00000350102 | 628 |
| HIBCH | 3-hydroxyisobutyryl-CoA hydrolase, | ENSG00000198130 | ENST00000392333 | ENSP00000376145 | 629 |
| | mitochondrial | | ENST00000414928 | ENSP00000414820 | 630 |
| NTRK1 | High affinity nerve growth factor | ENSG00000198400 | ENST00000358660 | ENSP00000351486 | 631 |
| | receptor | | ENST00000368196 | ENSP00000357179 | 632 |
| | | | ENST00000392302 | ENSP00000376120 | 633 |
| | | | ENST00000497019 | ENSP00000436804 | 634 |
| | | | ENST00000524377 | ENSP00000431418 | 635 |
| FAM19A2 | Protein FAM19A2 | ENSG00000198673 | ENST00000416284 | ENSP00000393987 | 636 |
| | | | ENST00000548780 | ENSP00000449310 | 637 |
| | | | ENST00000549379 | ENSP00000447584 | 638 |
| | | | ENST00000549958 | ENSP00000447280 | 639 |
| | | | ENST00000550003 | ENSP00000449457 | 640 |
| | | | ENST00000551449 | ENSP00000449632 | 641 |
| | | | ENST00000551619 | ENSP00000447305 | 642 |
| | | | ENST00000552075 | ENSP00000449516 | 643 |
| F5 | Coagulation factor V | ENSG00000198734 | ENST00000367796 | ENSP00000356770 | 644 |
| | | | ENST00000367797 | ENSP00000356771 | 645 |
| GK | Glycerol kinase | ENSG00000198814 | ENST00000378943 | ENSP00000368226 | 646 |
| | | | ENST00000427190 | ENSP00000401720 | 647 |
| | | | ENST00000488296 | ENSP00000419771 | 648 |
| INPP5F | Phosphatidylinositide phosphatase SAC2 | ENSG00000198825 | ENST00000490818 | ENSP00000487706 | 649 |
| | | | ENST00000631572 | ENSP00000488726 | 650 |
| CD177 | CD177 antigen | ENSG00000204936 | ENST00000378012 | ENSP00000367251 | 651 |
| | | | ENST00000607855 | ENSP00000483817 | 652 |
| | | | ENST00000618265 | ENSP00000479536 | 653 |
| LEPROT | Leptin Receptor Overlapping Transcrip | ENSG00000213625 | ENST00000371065 | ENSP00000360104 | 654 |
| | | | ENST00000613538 | ENSP00000483521 | 655 |
| TRIM16 | Tripartite motif- containing protein 16 | ENSG00000221926 | ENST00000579219 | ENSP00000463639 | 656 |
| LTA | Lymphotoxin-alpha | ENSG00000226979 | ENST00000418386 | ENSP00000413450 | 657 |
| | | | ENST00000454783 | ENSP00000403495 | 658 |
| PROB1 | Proline-rich basic protein 1 | ENSG00000228672 | ENST00000434752 | ENSP00000416033 | 659 |
| SSTR3 | Somatostatin receptor type 3 | ENSG00000278195 | ENST00000610913 | ENSP00000480971 | 660 |
| | | | ENST00000617123 | ENSP00000481325 | 661 |
| CEACAM1 | Carcinoembryonic antigen-related cell | ENSG00000079385 | ENST00000161559 | ENSP00000161559 | 662 |
| | adhesion molecule 1 | | ENST00000352591 | ENSP00000244291 | 663 |
| | | | ENST00000358394 | ENSP00000351165 | 664 |
| | | | ENST00000403444 | ENSP00000384709 | 665 |
| | | | ENST00000403461 | ENSP00000384083 | 666 |
| | | | ENST00000471298 | ENSP00000472633 | 667 |
| | | | ENST00000599389 | ENSP00000471918 | 668 |
| | | | ENST00000600172 | ENSP00000471566 | 669 |
| CTLA4 | Cytotoxic T-lymphocyte protein 4 | ENSG00000163599 | ENST00000295854 | ENSP00000295854 | 670 |
| | | | ENST00000302823 | ENSP00000303939 | 671 |
| | | | ENST00000427473 | ENSP00000409707 | 672 |
| | | | ENST00000472206 | ENSP00000417779 | 673 |
| TIGIT | T-cell immunoreceptor with Ig and ITIM | ENSG00000181847 | ENST00000383671 | ENSP00000373167 | 674 |
| | domains | | ENST00000461158 | ENSP00000418917 | 675 |
| | | | ENST00000481065 | ENSP00000420552 | 676 |
| | | | ENST00000484319 | ENSP00000419706 | 677 |
| | | | ENST00000486257 | ENSP00000419085 | 678 |
| IL2RA | Interleukin-2 receptor subunit alpha | ENSG00000134460 | ENST00000256876 | ENSP00000256876 | 679 |
| | | | ENST00000379954 | ENSP00000369287 | 680 |
| | | | ENST00000379959 | ENSP00000369293 | 681 |
| ENTPD1 | Ectonucleoside triphosphate | ENSG00000138185 | ENST00000371205 | ENSP00000360248 | 682 |
| | diphosphohydrolase 1 | | ENST00000371207 | ENSP00000360250 | 683 |
| | | | ENST00000453258 | ENSP00000390955 | 684 |
| | | | ENST00000483213 | ENSP00000489333 | 685 |
| | | | ENST00000543964 | ENSP00000442968 | 686 |
| | | | ENST00000635076 | ENSP00000489250 | 687 |
| ICOS | Inducible T-cell costimulator | ENSG00000163600 | ENST00000316386 | ENSP00000319476 | 688 |
| | | | ENST00000435193 | ENSP00000415951 | 689 |
| TNFRSF4 | Tumor necrosis factor receptor | ENSG00000186827 | ENST00000379236 | ENSP00000368538 | 690 |
| | superfamily member 4 | | | | |
| TNFRSF18 | Tumor necrosis factor receptor | ENSG00000186891 | ENST00000328596 | ENSP00000328207 | 691 |
| | superfamily member 18 | | ENST00000379265 | ENSP00000368567 | 692 |
| | | | ENST00000379268 | ENSP00000368570 | 693 |
| | | | ENST00000486728 | ENSP00000462735 | 694 |
| TNFRSF8 | Tumor necrosis factor receptor | ENSG00000120949 | ENST00000263932 | ENSP00000263932 | 695 |
| | superfamily member 8 | | ENST00000417814 | ENSP00000390650 | 696 |
| | | | ENST00000514649 | ENSP00000421938 | 697 |
| CD274 | Programmed cell death 1 ligand 1 | ENSG00000120217 | ENST00000381573 | ENSP00000370985 | 698 |
| | | | ENST00000381577 | ENSP00000370989 | 699 |
| IL2RB | Interleukin-2 receptor subunit beta | ENSG00000100385 | ENST00000216223 | ENSP00000216223 | 700 |
| | | | ENST00000429622 | ENSP00000402685 | 701 |
| | | | ENST00000445595 | ENSP00000401020 | 702 |
| | | | ENST00000453962 | ENSP00000403731 | 703 |
| TNFRSF9 | Tumor necrosis factor receptor | ENSG00000049249 | ENST00000377507 | ENSP00000366729 | 704 |
| | superfamily member 9 | | ENST00000474475 | ENSP00000465272 | 705 |
| | | | ENST00000615230 | ENSP00000478699 | 706 |
| IKZF2 | Zinc finger protein Helios | ENSG00000030419 | ENST00000442445 | ENSP00000390045 | 707 |

[0246] Genes of table VI are characterized by their Ensembl Gene accession number (ENSG), retrievable in the public database EnsEMBL (http://www.ensembl.org). Each related protein isoform is characterized by an Ensembl transcript accession number (ENST) and an Ensembl protein accession number (ENSP).

[0247] Identification of Transcript Isoforms Expressed by Tumor-Treg Cells

[0248] An important aspect to be verified in the selection of potential targets of tumor-T reg is that the protein isoforms predicted to be surface exposed/membrane associated by the cell localization algorithms are indeed expressed in tumor Treg cells. Thus, total RNA was extracted from tumor Treg cells isolated from NSCLC or CRC samples and subjected to RT-PCR using specific primer pairs able to discriminate the different isoforms annotated for each gene. Exemplificative results of protein isoforms predicted to be surface exposed and detected in tumor T reg cells is reported in Table VII. Moreover, an example of RT-PCR analysis carried out for SIRPG is reported in FIG. 10.

TABLE VII
Representative examples of transcripts detected
in tumor-infiltrating Treg cells

| GENE | Surface predicted isoform detected |
|---|---|
| SYMBOL | in Tumor Treg cells |
| CCR8 | ENST00000326306 |
| LAYN | ENST00000375614 and/or ENST00000533265 |
| | and/or ENST00000375615 and/or |
| | ENST00000525126 |
| CD7 | ENST00000312648 and/or ENST00000584284 |
| CXCL13 | ENST00000286758 |
| FCRL3 | ENST00000492769 and/or ENST00000368184 |
| | and/or ENST00000368186 and/or |
| | ENST00000485028 |
| IL1R2 | ENST00000332549 and/or ENST00000393414 |
| IL21R | ENST00000337929 and/or ENST00000395754 |
| | and/or ENST00000564089 |
| NTNG2 | ENST00000393229 |
| SIRPG | ENST00000303415 and/or ENST00000216927 |
| | and/or ENST00000344103 and/or |
| | ENST00000381580 and/or ENST00000381583 |
| TSPAN5 | ENST00000305798 and/or ENST00000505184 |
| TMPRSS3 | ENST00000291532 |
| TMPRSS6 | ENST00000406725 and/or ENST00000406856 |
| NDFIP2 | ENST00000218652 |

[0249] Discussion

[0250] Diversity of tumor infiltrating Treg cells should be fully elucidated to understand their functional relevance and prognostic significance in different types of cancer, and to possibly improve the therapeutic efficacy of Treg cell modulation through the selective depletion of tumor infiltrating Treg cells. The transcriptome analysis performed on CRC- and NSCLC-infiltrating T cells showed that tumor-infiltrating Treg cells are different from both circulating and normal tissue-infiltrating Tregs, suggesting that the tumor microenvironment influences specific gene expression in Treg cells. Our findings further support the view that Treg cells from different tissues are instructed by environmental factors to display different gene expression profiles (Panduro et al., 2016). Indeed the list of signature genes includes a number of molecules that are consistently upregulated in tumor infiltrating Treg cells isolated from different tumor types, and these signature genes would have not been identified if the inventors had not profiled specifically tumor infiltrating Treg cells. It was found tumor-infiltrating-Treg signature genes are not only largely shared between CRC and NSCLC infiltrating cells, but are also conserved in breast and gastric cancers as well as in CRC and NSCLC metastatic tumors (in liver and brain respectively) suggesting that expression of these genes is a common feature of tumor infiltrating Treg cells that may correlate with Treg cells specific function within the tumor microenvironment. Although our knowledge on the function of immune checkpoints on lymphocytes is still incomplete, agonist or antagonist monoclonal antibodies targeting checkpoints are in clinical development. Interestingly, it has been found that some of these checkpoints (such as GITR, OX40, TIGIT, LAG-3 and TIM-3) and some of their ligands (such as OX40LG, Galectin-9, CD70) are upregulated also in tumor infiltrating Treg cells, and this fact should be taken into account in interpreting clinical results with checkpoint inhibitors. Indeed, it is likely that assessment of the expression of checkpoints and of their ligands on the various subsets of tumor infiltrating lymphocytes will help to elucidate conflicting results and provide the rationale for combination therapies. Therefore, expression pattern of checkpoints should be evaluated both in tumor infiltrating lymphocytes and in tumor cells. Single-cell analysis on selected tumor Treg signature genes confirmed the whole transcriptomic data and provided information on the expression frequency of these genes. Tumor infiltrating Treg cells express with high frequency genes that are associated with increased suppressor activity, such as the well characterized OX40, CTLA4 and GITR. Moreover, there are a number of interesting and less expected genes the specific expression of which was validated also at the protein level. For example, IL-1R2 upregulation could be another mechanism that tumor resident Treg cells employ to dampen anti-tumor immune responses through the neutralization of IL-1β function on effector cells. PD-L1 and PD-L2 expression has been recently reported on activated T cells or APCs (Boussiotis et al., 2014; Lesterhuis et al., 2011; Messal et al., 2011) but, to the best of our knowledge, neither PD-L2 nor PD-L1 expression has ever been reported in Treg cells, and our finding that they are overexpressed in tumor infiltrating Treg cells adds an additional level of complexity to the PD1/PD-Ls immunomodulatory axis within the tumor microenvironment. BATF is a transcription factor that has been mainly associated to Th17 development and CD8⁺ T cells differentiation (Murphy et al., 2013). Our findings show that BATF transcript is upregulated in tumor infiltrating Treg cells more than in tumor infiltrating Th17 cells (FIG. 8). Interestingly, expression of BATF in CD8⁺ T cells is induced by IL-21 (Xin et al., 2015), and it was found that IL21R is highly expressed in tumor-infiltrating Treg cells (FIG. 4).

[0251] It was showed that tumor infiltrating Treg cells express high amounts of 4-1BB (CD137) a marker of TcR mediated activation (Schoenbrunn et al., 2012) and have shown they display very high suppressor function on effector T cell proliferation. It could be that expression of the signature genes correlated with the enhanced suppressive ability and so contributed to the establishment of a strong immunosuppressive environment at tumor sites. A corollary to our findings would have that increased number of Treg cells in the tumor environment should associate with a worst clinical outcome. In fact, when LAYN, MAGEH1 and CCR8 (which represent three of the most enriched genes in tumor infiltrating Treg cells) are highly detected in whole tumor samples there is a significant worsening of the 5 years survival of both CRC and NSCLC patients. Although, the functional roles in Treg cells of LAYN, a transmembrane protein with homology to c-type lectin (Borowsky and Hynes, 1998), and of MAGEH1, a member of the Melanoma Antigen Gene family (Weon and Potts, 2015) are unknown, the high expression of the chemokine receptor CCR8 is instead intriguing. Indeed CCL18, the ligand of CCR8 (Islam et al., 2013), is highly expressed in different tumors including NSCLC (Chen et al., 2011; Schutyser et al., 2005). The high specificity of CCR8 expression on tumor infiltrating Treg cells suggests it could be a new interesting therapeutic target to inhibit Treg cells trafficking to tumor sites, without disturbing recruitment of other effector T cells that do not express CCR8. Considerable efforts have been recently put in the development of sophisticated bioinformatics approaches that exploit lymphocyte gene expression data to understand the immune-modulatory networks at tumor sites, to predict clinical responses to immune-therapies, and to define novel therapeutic targets (Bindea et al., 2013a; Bindea et al., 2013b; Gentles et al., 2015). The data here presented represent the first comprehensive RNA-sequencing analysis performed on tumor-infiltrating human CD4⁺ Treg, Th1 and Th17 cells. Our findings highlight the relevance of assessing gene expression patterns of lymphocyte at tumor-sites and suggest that generation of more transcriptomic data of tumor-infiltrating lymphocyte subsets purified from different cancer types may contribute to a better understanding of the dynamics underlying immune modulation in the tumor microenvironment. Moreover, our data represent a resource to generate and validate novel hypotheses that will increase our knowledge on tumor infiltrating Treg cell biology and should lead to the identification of new therapeutic targets.

### REFERENCES

[0252] Arpaia, N., Green, J. A., Moltedo, B., Arvey, A., Hemmers, S., Yuan, S., Treuting, P. M., and Rudensky, A. Y. (2015). A Distinct Function of Regulatory T Cells in Tissue Protection. Cell 162, 1078-1089.
[0253] Bindea, G., Galon, J., and Mlecnik, B. (2013a). CluePedia Cytoscape plugin: pathway insights using integrated experimental and in silico data. Bioinformatics 29, 661-663.
[0254] Bindea, G., Mlecnik, B., Tosolini, M., Kirilovsky, A., Waldner, M., Obenauf, A. C., Angell, H., Fredriksen, T., Lafontaine, L., Berger, A., et al. (2013b). Spatiotemporal dynamics of intratumoral immune cells reveal the immune landscape in human cancer. Immunity 39, 782-795.
[0255] Bolger, A. M., Lohse, M., and Usadel, B. (2014). Trimmomatic: a flexible trimmer for Illumina sequence data. Bioinformatics 30, 2114-2120.
[0256] Borowsky, M. L., and Hynes, R. O. (1998). Layilin, a novel talin-binding transmembrane protein homologous with C-type lectins, is localized in membrane ruffles. J Cell Biol 143, 429-442.
[0257] Boussiotis, V. A., Chatterjee, P., and Li, L. (2014). Biochemical signaling of PD-1 on T cells and its functional implications. Cancer J 20, 265-271.
[0258] Burzyn, D., Kuswanto, W., Kolodin, D., Shadrach, J. L., Cerletti, M., Jang, Y., Sefik, E., Tan, T. G., Wagers, A. J., Benoist, C., et al. (2013). A special population of regulatory T cells potentiates muscle repair. Cell 155, 1282-1295.
[0259] Campbell, D. J., and Koch, M. A. (2011). Phenotypical and functional specialization of FOXP3+ regulatory T cells. Nat Rev Immunol 11, 119-130.
[0260] Carthon, B. C., Wolchok, J. D., Yuan, J., Kamat, A., Ng Tang, D. S., Sun, J., Ku, G., Troncoso, P., Logothetis, C. J., Allison, J. P., et al. (2010). Preoperative CTLA-4 blockade: tolerability and immune monitoring in the setting of a presurgical clinical trial. Clin Cancer Res 16, 2861-2871.
[0261] Chen, J., Yao, Y., Gong, C., Yu, F., Su, S., Chen, J., Liu, B., Deng, H., Wang, F., Lin, L., et al. (2011). CCL18 from tumor-associated macrophages promotes breast cancer metastasis via PITPNM3. Cancer Cell 19, 541-555.
[0262] Cipolletta, D., Feuerer, M., Li, A., Kamei, N., Lee, J., Shoelson, S. E., Benoist, C., and Mathis, D. (2012). PPAR-gamma is a major driver of the accumulation and phenotype of adipose tissue Treg cells. Nature 486, 549-553.
[0263] Duhen, T., Duhen, R., Lanzavecchia, A., Sallusto, F., and Campbell, D. J. (2012). Functionally distinct subsets of human FOXP3+ Treg cells that phenotypically mirror effector Th cells. Blood 119, 4430-4440.
[0264] Fridman, W. H., Pages, F., Sautes-Fridman, C., and Galon, J. (2012). The immune contexture in human tumours: impact on clinical outcome. Nat Rev Cancer 12, 298-306.
[0265] Galluzzi, L., Buque, A., Kepp, O., Zitvogel, L., and Kroemer, G. (2015). Immunological Effects of Conventional Chemotherapy and Targeted Anticancer Agents. Cancer Cell 28, 690-714.
[0266] Geginat, J., Paroni, M., Maglie, S., Alfen, J. S., Kastirr, I., Gruarin, P., De Simone, M., Pagani, M., and Abrignani, S. (2014). Plasticity of human CD4 T cell subsets. Front Immunol 5, 630.
[0267] Gentles, A. J., Newman, A. M., Liu, C. L., Bratman, S. V., Feng, W., Kim, D., Nair, V. S., Xu, Y., Khuong, A., Hoang, C. D., et al. (2015). The prognostic landscape of genes and infiltrating immune cells across human cancers. Nat Med 21, 938-945.
[0268] Gonzalez-Pons, M., and Cruz-Correa, M. (2015). Colorectal Cancer Biomarkers: Where Are We Now? Biomed Res Int 2015, 149014.
[0269] Hodi, F. S., O'Day, S. J., McDermott, D. F., Weber, R. W., Sosman, J. A., Haanen, J. B., Gonzalez, R., Robert, C., Schadendorf, D., Hassel, J. C., et al. (2010). Improved survival with ipilimumab in patients with metastatic melanoma. N Engl J Med 363, 711-723.
[0270] Huang da, W., Sherman, B. T., and Lempicki, R. A. (2009). Systematic and integrative analysis of large gene lists using DAVID bioinformatics resources. Nat Protoc 4, 44-57.
[0271] Islam, S. A., Ling, M. F., Leung, J., Shreffler, W. G., and Luster, A. D. (2013). Identification of human CCR8 as a CCL18 receptor. J Exp Med 210, 1889-1898.
[0272] Jacobs, J., Smits, E., Lardon, F., Pauwels, P., and Deschoolmeester, V. (2015). Immune Checkpoint Modulation in Colorectal Cancer: What's New and What to Expect. J Immunol Res 2015, 158038.
[0273] Jamal-Hanjani, M., Thanopoulou, E., Peggs, K. S., Quezada, S. A., and Swanton, C. (2013). Tumour heterogeneity and immune-modulation. Curr Opin Pharmacol 13, 497-503.
[0274] Joller, N., Lozano, E., Burkett, P. R., Patel, B., Xiao, S., Zhu, C., Xia, J., Tan, T. G., Sefik, E., Yajnik, V., et al. (2014). Treg cells expressing the coinhibitory molecule TIGIT selectively inhibit proinflammatory Th1 and Th17 cell responses. Immunity 40, 569-581.
[0275] Josefowicz, S. Z., Lu, L. F., and Rudensky, A. Y. (2012). Regulatory T cells: mechanisms of differentiation and function. Annu Rev Immunol 30, 531-564.
[0276] Kharchenko, P. V., Silberstein, L., and Scadden, D. T. (2014). Bayesian approach to single-cell differential expression analysis. Nat Methods 11, 740-742.
[0277] Kroemer, G., Galluzzi, L., Zitvogel, L., and Fridman, W. H. (2015). Colorectal cancer: the first neoplasia found to be under immunosurveillance and the last one to respond to immunotherapy? Oncoimmunology 4, e1058597.
[0278] Le, D. T., Uram, J. N., Wang, H., Bartlett, B. R., Kemberling, H., Eyring, A. D., Skora, A. D., Luber, B. S., Azad, N. S., Laheru, D., et al. (2015). PD-1 Blockade in Tumors with Mismatch-Repair Deficiency. N Engl J Med 372, 2509-2520.
[0279] Lesterhuis, W. J., Steer, H., and Lake, R. A. (2011). PD-L2 is predominantly expressed by Th2 cells. Mol Immunol 49, 1-3.
[0280] Loffler-Wirth, H., Kalcher, M., and Binder, H. (2015). oposSOM: R-package for high-dimensional portraying of genome-wide expression landscapes on bioconductor. Bioinformatics 31, 3225-3227.
[0281] Marabelle, A., Kohrt, H., Sagiv-Barfi, I., Ajami, B., Axtell, R. C., Zhou, G., Rajapaksa, R., Green, M. R., Torchia, J., Brody, J., et al. (2013). Depleting tumor-specific Tregs at a single site eradicates disseminated tumors. J Clin Invest 123, 2447-2463.
[0282] Messal, N., Serriari, N. E., Pastor, S., Nunes, J. A., and Olive, D. (2011). PD-L2 is expressed on activated human T cells and regulates their function. Mol Immunol 48, 2214-2219.
[0283] Munn, D. H., and Bronte, V. (2015). Immune suppressive mechanisms in the tumor microenvironment. Curr Opin Immunol 39, 1-6.
[0284] Murphy, T. L., Tussiwand, R., and Murphy, K. M. (2013). Specificity through cooperation: BATF-IRF interactions control immune-regulatory networks. Nat Rev Immunol 13, 499-509.
[0285] Nishikawa, H., and Sakaguchi, S. (2010). Regulatory T cells in tumor immunity. Int J Cancer 127, 759-767.
[0286] Panduro, M., Benoist, C., and Mathis, D. (2016). Tissue Tregs. Annu Rev Immunol 34, 609-633.
[0287] Pardoll, D. M. (2012). The blockade of immune checkpoints in cancer immunotherapy. Nat Rev Cancer 12, 252-264.
[0288] Peggs, K. S., Quezada, S. A., Chambers, C. A., Korman, A. J., and Allison, J. P. (2009). Blockade of CTLA-4 on both effector and regulatory T cell compartments contributes to the antitumor activity of anti-CTLA-4 antibodies. J Exp Med 206, 1717-1725.
[0289] Ranzani, V., Rossetti, G., Panzeri, I., Arrigoni, A., Bonnal, R. J., Curti, S., Gruarin, P., Provasi, E., Sugliano, E., Marconi, M., et al. (2015). The long intergenic noncoding RNA landscape of human lymphocytes highlights the regulation of T cell differentiation by linc-MAF-4. Nature immunology 16, 318-325.
[0290] Ripley, B. D. (1996) Pattern Recognition and Neural Networks. Cambridge: Cambridge University Press. [i, 2, 8, 36, 42, 59, 69, 73, 79, 91, 92]
[0291] Sakaguchi, S., Yamaguchi, T., Nomura, T., and Ono, M. (2008). Regulatory T cells and immune tolerance. Cell 133, 775-787.
[0292] Sato, M., Larsen, J. E., Lee, W., Sun, H., Shames, D. S., Dalvi, M. P., Ramirez, R. D., Tang, H., DiMaio, J. M., Gao, B., et al. (2013). Human lung epithelial cells progressed to malignancy through specific oncogenic manipulations. Mol Cancer Res 11, 638-650.
[0293] Schoenbrunn, A., Frentsch, M., Kohler, S., Keye, J., Dooms, H., Moewes, B., Dong, J., Loddenkemper, C., Sieper, J., Wu, P., et al. (2012). A converse 4-1BB and CD40 ligand expression pattern delineates activated regulatory T cells (Treg) and conventional T cells enabling direct isolation of alloantigen-reactive natural Foxp3+ Treg. J Immunol 189, 5985-5994.
[0294] Schutyser, E., Richmond, A., and Van Damme, J. (2005). Involvement of CC chemokine ligand 18 (CCL18) in normal and pathological processes. J Leukoc Biol 78, 14-26.
[0295] Selby, M. J., Engelhardt, J. J., Quigley, M., Henning, K. A., Chen, T., Srinivasan, M., and Korman, A. J. (2013). Anti-CTLA-4 antibodies of IgG2a isotype enhance antitumor activity through reduction of intratumoral regulatory T cells. Cancer Immunol Res 1, 32-42.
[0296] Sharma, P., and Allison, J. P. (2015). Immune checkpoint targeting in cancer therapy: toward combination strategies with curative potential. Cell 161, 205-214.
[0297] Simpson, T. R., Li, F., Montalvo-Ortiz, W., Sepulveda, M. A., Bergerhoff, K., Arce, F., Roddie, C., Henry, J. Y., Yagita, H., Wolchok, J. D., et al. (2013). Fc-dependent depletion of tumor-infiltrating regulatory T cells co-defines the efficacy of anti-CTLA-4 therapy against melanoma. J Exp Med 210, 1695-1710.
[0298] Sledzinska, A., Menger, L., Bergerhoff, K., Peggs, K. S., and Quezada, S. A. (2015). Negative immune checkpoints on T lymphocytes and their relevance to cancer immunotherapy. Mol Oncol.
[0299] Smith, J. J., Deane, N. G., Wu, F., Merchant, N. B., Zhang, B., Jiang, A., Lu, P., Johnson, J. C., Schmidt, C., Bailey, C. E., et al. (2010). Experimentally derived metastasis gene expression profile predicts recurrence and death in patients with colon cancer. Gastroenterology 138, 958-968.
[0300] Sobin, L. H., Gospodarowicz, M. K., Wittekind, C., International Union against Cancer., and ebrary Inc. (2009). TNM classification of malignant tumours (Chichester, West Sussex, UK; Hoboken, N.J.: Wiley-Blackwell), pp. 100-105, 138-146, 7^{th} edition
[0301] Teng, M. W., Ngiow, S. F., von Scheidt, B., McLaughlin, N., Sparwasser, T., and Smyth, M. J. (2010). Conditional regulatory T-cell depletion releases adaptive immunity preventing carcinogenesis and suppressing established tumor growth. Cancer Res 70, 7800-7809.
[0302] Therneau T. 2013. A package for survival analysis in S. R package version 2.37-4.
[0303] Topalian, S. L., Drake, C. G., and Pardoll, D. M. (2015). Immune checkpoint blockade: a common denominator approach to cancer therapy. Cancer Cell 27, 450-461.
[0304] Torre, L. A., Bray, F., Siegel, R. L., Ferlay, J., Lortet-Tieulent, J., and Jemal, A. (2015). Global cancer statistics, 2012. CA Cancer J Clin 65, 87-108.
[0305] Twyman-Saint Victor, C., Rech, A. J., Maity, A., Rengan, R., Pauken, K. E., Stelekati, E., Benci, J. L., Xu, B., Dada, H., Odorizzi, P. M., et al. (2015). Radiation and dual checkpoint blockade activate non-redundant immune mechanisms in cancer. Nature 520, 373-377.
[0306] van den Eertwegh, A. J., Versluis, J., van den Berg, H. P., Santegoets, S. J., van Moorselaar, R. J., van der Sluis, T. M., Gall, H. E., Harding, T. C., Jooss, K., Lowy, I., et al. (2012). Combined immunotherapy with granulocyte-macrophage colony-stimulating factor-transduced allogeneic prostate cancer cells and ipilimumab in patients with metastatic castration-resistant prostate cancer: a phase 1 dose-escalation trial. Lancet Oncol 13, 509-517.
[0307] Voo, K. S., Bover, L., Harline, M. L., Vien, L. T., Facchinetti, V., Arima, K., Kwak, L. W., and Liu, Y. J. (2013). Antibodies targeting human OX40 expand effector T cells and block inducible and natural regulatory T cell function. J Immunol 191, 3641-3650.
[0308] Walter, S., Weinschenk, T., Stenzl, A., Zdrojowy, R., Pluzanska, A., Szczylik, C., Staehler, M., Brugger, W., Dietrich, P. Y., Mendrzyk, R., et al. (2012). Multipeptide immune response to cancer vaccine IMA901 after single-dose cyclophosphamide associates with longer patient survival. Nat Med 18, 1254-1261.
[0309] Weon, J. L., and Potts, P. R. (2015). The MAGE protein family and cancer. Curr Opin Cell Biol 37, 1-8.
[0310] Wirth, H., von Bergen, M., and Binder, H. (2012). Mining SOM expression portraits: feature selection and integrating concepts of molecular function. BioData Min 5, 18.
[0311] Xin, G., Schauder, D. M., Lainez, B., Weinstein, J. S., Dai, Z., Chen, Y., Esplugues, E., Wen, R., Wang, D., Parish, I. A., et al. (2015). A Critical Role of IL-21-Induced BATF in Sustaining CD8-T-Cell-Mediated Chronic Viral Control. Cell Rep 13, 1118-1124.
[0312] Yang, J. C., Hughes, M., Kammula, U., Royal, R., Sherry, R. M., Topalian, S. L., Suri, K. B., Levy, C., Allen, T., Mavroukakis, S., et al. (2007). Ipilimumab (anti-CTLA4 antibody) causes regression of metastatic renal cell cancer associated with enteritis and hypophysitis. J Immunother 30, 825-830.
[0313] Zitvogel, L., Galluzzi, L., Smyth, M. J., and Kroemer, G. (2013). Mechanism of action of conventional and targeted anticancer therapies: reinstating immunosurveillance. Immunity 39, 74-88.
[0314] Sebastian Briesemeister, Jörg Rahnenführer, and Oliver Kohlbacher, (2010). Going from where to why—interpretable prediction of protein subcellular localization, Bioinformatics, 26(9):1232-1238.
[0315] Lukas Käll, Anders Krogh and Erik L. L. Sonnhammer. Advantages of combined transmembrane topology and signal peptide prediction—the Phobius web server. Nucleic Acids Res., 35:W429-32, July 2007

The application's sequence listing, which the Patent Office published only in electronic form, follows.

SEQUENCE LISTING (791 sequences)

SEQ ID NO: 1 - protein, 374 aa, Homo sapiens
MRPGTALQAVLLAVLLVGLRAATGRLLSGQPVCRGGTQRPCYKVIYFHDTSRRLNFEEAKEACRRDGGQLVSIESEDEQKLIEKFIENLLPSDGDFWIGLRRREEKQSNSTACQDLYAWTDGSISQFRNWYVDEPSCGSEVCVVMYHQPSAPAGIGGPYMFQWNDDRCNMKNNFICKYSDEKPAVPSREAEGEETELTTPVLPEETQEEDAKKTFKESREAALNLAYILIPSIPLLLLLVVTTVVCWVWICRKRKREQPDPSTKKQHTIWPSPHQGNSPDLEVYNVIRKQSEADLAETRPDLKNISFRVCSGEATPDDMSCDYDNMAVNPSESGFVTLVSVESGFVTNDIYEFSPDQMGRSKESGWVENEIYGY

SEQ ID NO: 2 - protein, 382 aa, Homo sapiens
MRPGTALQAVLLAVLLVGLRAATGRLLSASDLDLRGGQPVCRGGTQRPCYKVIYFHDTSRRLNFEEAKEACRRDGGQLVSIESEDEQKLIEKFIENLLPSDGDFWIGLRRREEKQSNSTACQDLYAWTDGSISQFRNWYVDEPSCGSEVCVVMYHQPSAPAGIGGPYMFQWNDDRCNMKNNFICKYSDEKPAVPSREAEGEETELTTPVLPEETQEEDAKKTFKESREAALNLAYILIPSIPLLLLLVVTTVVCWVWICRKRKREQPDPSTKKQHTIWPSPHQGNSPDLEVYNVIRKQSEADLAETRPDLKNISFRVCSGEATPDDMSCDYDNMAVNPSESGFVTLVSVESGFVTNDIYEFSPDQMGRSKESGWVENEIYGY

SEQ ID NO: 3 - protein, 229 aa, Homo sapiens
MVTSGLGSGGVRRNKAIAQPARTFMLGLMAAYHNLEKPAVPSREAEGEETELTTPVLPEETQEEDAKKTFKESREAALNLAYILIPSIPLLLLLVVTTVVCWVWICRKRKREQPDPSTKKQHTIWPSPHQGNSPDLEVYNVIRKQSEADLAETRPDLKNISFRVCSGEATPDDMSCDYDNMAVNPSESGFVTLVSVESGFVTNDIYEFSPDQMGRSKESGWVENEIYGY

SEQ ID NO: 4 - protein, 270 aa, Homo sapiens
MRPGTALQAVLLAVLLVGLRAATGRLLSASDLDLRGGQPVCRGGTQRPCYKVIYFHDTSRRLNFEEAKEACRRDGGQLVSIESEDEQKLIEKFIENLLPSDGDFWIGLRRREEKQSNSTACQDLYAWTDGSISQFRNWYVDEPSCGSEVCVVMYHQPSAPAGIGGPYMFQWNDDRCNMKNNFICKYSDEKPAVPSREAEGEETELTTPVLPEETQEEDAKKTFKESREAALNLAYILIPSIPLLLLLVVTTVVCWVWICRKRQKTGAARP

SEQ ID NO: 5 - protein, 134 aa, Homo sapiens
MRPGTALQAVLLAVLLVGLRAATGRLLSGQPVCRGGTQRPCYKVIYFHDTSRRLNFEEAKEACRRDGGQLVSIESEDEQKLIEKFIENLLPSDGDFWIGLRRREEKQSNSTACQDLYAWTDGSISQFRETSSSF

SEQ ID NO: 6 - protein, 108 aa, Homo sapiens
MVTSGLGSGGVRRNKAIAQPARTFMLGLMAAYHNLEKPAVPSREAEGEETELTTPVLPEETQEEDAKKTFKESREAALNLAYILIPSIPLLLLLVVTTVVCWVWICRK

SEQ ID NO: 7 - protein, 109 aa, Homo sapiens
MYHQPSAPAGIGGPYMFQWNDDRCNMKNNFICKYSDEKPAVPSREAEGEETELTTPVLPEETQEEDAKKTFKESREAALNLAYILIPSIPLLLLLVVTTVVCWVWICRK

SEQ ID NO: 8 - protein, 262 aa, Homo sapiens
MRPGTALQAVLLAVLLVGLRAATGRLLSGQPVCRGGTQRPCYKVIYFHDTSRRLNFEEAKEACRRDGGQLVSIESEDEQKLIEKFIENLLPSDGDFWIGLRRREEKQSNSTACQDLYAWTDGSISQFRNWYVDEPSCGSEVCVVMYHQPSAPAGIGGPYMFQWNDDRCNMKNNFICKYSDEKPAVPSREAEGEETELTTPVLPEETQEEDAKKTFKESREAALNLAYILIPSIPLLLLLVVTTVVCWVWICRKRQKTGAARP

SEQ ID NO: 9 - protein, 49 aa, Homo sapiens
MYHQPSAPAGIGGPYMFQWNDDRCNMKNNFICKYSDEKPAVPSREAEGE

SEQ ID NO: 10 - protein, 355 aa, Homo sapiens
MDYTLDLSVTTVTDYYYPDIFSSPCDAELIQTNGKLLLAVFYCLLFVFSLLGNSLVILVLVVCKKLRSITDVYLLNLALSDLLFVFSFPFQTYYLLDQWVFGTVMCKVVSGFYYIGFYSSMFFITLMSVDRYLAVVHAVYALKVRTIRMGTTLCLAVWLTAIMATIPLLVFYQVASEDGVLQCYSFYNQQTLKWKIFTNFKMNILGLLIPFTIFMFCYIKILHQLKRCQNHNKTKAIRLVLIVVIASLLFWVPFNVVLFLTSLHSMHILDGCSISQQLTYATHVTEIISFTHCCVNPVIYAFVGEKFKKHLSEIFQKSCSQIFNYLGRQMPRESCEKSSSCQQHSSRSSSVDYIL

SEQ ID NO: 11 - protein, 118 aa, Homo sapiens
MDYTLDLSVTTVTDYYYPDIFSSPCDAELIQTNDLLSAGPVGVWDCNVQSGVWLLLHWLLQQHVFHHPHECGQVPGCCPCRVCPKGEDDQDGHNAVPGSMANRHYGYHPIASVLPSGL

SEQ ID NO: 12 - protein, 538 aa, Homo sapiens
MPRGWAAPLLLLLLQGGWGCPDLVCYTDYLQTVICILEMWNLHPSTLTLTWQDQYEELKDEATSCSLHRSAHNATHATYTCHMDVFHFMADDIFSVNITDQSGNYSQECGSFLLAESIKPAPPFNVTVTFSGQYNISWRSDYEDPAFYMLKGKLQYELQYRNRGDPWAVSPRRKLISVDSRSVSLLPLEFRKDSSYELQVRAGPMPGSSYQGTWSEWSDPVIFQTQSEELKEGWNPHLLLLLLLVIVFIPAFWSLKTHPLWRLWKKIWAVPSPERFFMPLYKGCSGDFKKWVGAPFTGSSLELGPWSPEVPSTLEVYSCHPPRSPAKRLQLTELQEPAELVESDGVPKPSFWPTAQNSGGSAYSEERDRPYGLVSIDTVTVLDAEGPCTWPCSCEDDGYPALDLDAGLEPSPGLEDPLLDAGTTVLSCGCVSAGSPGLGGPLGSLLDRLKPPLADGEDWAGGLPWGGRSPGGVSESEAGSPLAGLDMDTFDSGFVGSDCSSPVECDFTSPGDEGPPRSYLRQWVVIPPPLSSPGPQAS

SEQ ID NO: 13 - protein, 538 aa, Homo sapiens; identical to SEQ ID NO: 12

SEQ ID NO: 14 - protein, 538 aa, Homo sapiens; identical to SEQ ID NO: 12

SEQ ID NO: 15 - protein, 467 aa, Homo sapiens
MRPQELPRLAFPLLLLLLLLLPPPPCPAHSATRFDPTWESLDARQLPAWFDQAKFGIFIHWGVFSVPSFGSEWFWWYWQKEKIPKYVEFMKDNYPPSFKYEDFGPLFTAKFFNANQWADIFQASGAKYIVLTSKHHEGFTLWGSEYSWNWNAIDEGPKRDIVKELEVAIRNRTDLRFGLYYSLFEWFHPLFLEDESSSFHKRQFPVSKTLPELYELVNNYQPEVLWSDGDGGAPDQYWNSTGFLAWLYNESPVRGTVVTNDRWGAGSICKHGGFYTCSDRYNPGHLLPHKWENCMTIDKLSWGYRREAGISDYLTIEELVKQLVETVSCGGNLLMNIGPTLDGTISVVFEERLRQMGSWLKVNGEAIYETHTWRSQNDTVTPDVWYTSKPKEKLVYAIFLKWPTSGQLFLGHPKAILGATEVKLLGHGQPLNWISLEQNGIMVELPQLTIHQMPCKWGWALALTNVI

SEQ ID NO: 16 - protein, 109 aa, Homo sapiens
QLVETVSCGGNLLMNIGPTLDGTISVVFEERLRQMGSWLKVNGEAIYETHTWRSQNDTVTPDVWYTSKPKEKLVYAIFLKWPTSGQLFLGHPKAILGATEVRGNFTLFL

SEQ ID NO: 17 - protein, 350 aa, Homo sapiens
MSGHKCSYPWDLQDRYAQDKSVVNKMQQKYWETKQAFIKATGKKEDEHVVASDADLDAKLELFHSIQRTCLDLSKAIVLYQKRICFLSQEENELGKFLRSQGFQDKTRAGKMMQATGKALCFSSQQRLALRNPLCRFHQEVETFRHRAISDTWLTVNRMEQCRTEYRGALLWMKDVSQELDPDLYKQMEKFRKVQTQVRLAKKNFDKLKMDVCQKVDLLGASRCNLLSHMLATYQTTLLHFWEKTSHTMAAIHESFKGYQPYEFTTLKVWKLEGPLENLEKSKVLFISQAKSIAESIIIPGLRMLKRELCPQQSLFLSFFLSFFFFFFFFTASGFNTMRIYCNPKARIEP

SEQ ID NO: 18 - protein, 443 aa, Homo sapiens
MAASPHTLSSRLLTGCVGGSVWYLERRTIQDSPHKFLHLLRNVNKQWITFQHFSFLKRMYVTQLNRSHNQQVRPKPEPVASPFLEKTSSGQAKAEIYEMRPLSPPSLSLSRKPNEKELIELEPDSVIEDSIDVGKETKEEKRWKEMKLQVYDLPGILARLSKIKLTALVVSTTAAGFALAPGPFDWPCFLLTSVGTGLASCAANSINQFFEVPFDSNMNRTKNRPLVRGQISPLLAVSFATCCAVPGVAILTLGVNPLTGALGLFNIFLYTCCYTPLKRISIANTWVGAVVGAIPPVMGWTAATGSLDAGAFLLGGILYSWQFPHFNALSWGLREDYSRGGYCMMSVTHPGLCRRVALRHCLALLVLSAAAPVLDITTWTFPIMALPINAYISYLGFRFYVDADRRSSRRLFFCSLWHLPLLLLLMLTCKRPSGGGDAGPPPS

SEQ ID NO: 19 - protein, 168 aa, Homo sapiens
MCFPKVLSDDMKKLKARMVMSSLAELEDDFKEGYLETVAAYYEEQHPELTPLLEKERDGLRCRGNRSPVPDVEDPATEEPGESFCDKVMRWFQAMLQRLQTWWHGVLAWVKEKVVALVHAVQALWKQFQSFCCSLSELFMSSFQSYGAPRGDKEELTPQKCSEPQSSK

SEQ ID NO: 20 - protein, 234 aa, Homo sapiens
MCFPKVLSDDMKKLKARMVMLLPTSAQGLGAWVSACDTEDTVGHLGPWRDKDPALWCQLCLSSQHQAIERFYDKMQNAESGRGQVMSSLAELEDDFKEGYLETVAAYYEEQHPELTPLLEKERDGLRCRGNRSPVPDVEDPATEEPGESFCDKVMRWFQAMLQRLQTWWHGVLAWVKEKVVALVHAVQALWKQFQSFCCSLSELFMSSFQSYGAPRGDKEELTPQKCSEPQSSK

SEQ ID NO: 21 - protein, 131 aa, Homo sapiens
MCFPKVLSDDMKKLKARMDDFKEGYLETVAAYYEEQHPELTPLLEKERDGLRCRGNRSPVPDVEDPATEEPGESFCDKVMRWFQAMLQRLQTWWHGVLAWVKEKVVALVHAVQALWKQFQSFCCSLSELFM

SEQ ID NO: 22 - protein, 442 aa, Homo sapiens
MCFPKVLSDDMKKLKARMVMLLPTSAQGLGAWVSACDTEDTVGHLGPWRDKDPALWCQLCLSSQHQAIERFYDKMQNAESGRGQVMSSLAELEDDFKEGYLETVAAYYEEQHPELTPLLEKERDGLRCRGNRSPVPDVEDPATEEPGESFCDKVMRWFQAMLQRLQTWWHGVLAWVKEKVVALVHAVQALWKQFQSFCCSLSELFMSSFQSYGATRGARRSMCFPKVLSDDMKKLKARMVMLLPTSAQGLGAWVSACDTEDTVGHLGPWRDKDPALWCQLCLSSQHQAIERFYDKMQNAESGRGQVMSSLAELEDDFKEGYLETVAAYYEEQHPELTPLLEKERDGLRCRGNRSPVPDVEDPATEEPGESFCDKVMRWFQAMLQRLQTWWHGVLAWVKEKVVALVHAVQALWKQFQSFCCSLSELFMSSFQSYGATRGARRS

SEQ ID NO: 23 - protein, 168 aa, Homo sapiens; identical to SEQ ID NO: 19

SEQ ID NO: 24 - protein, 234 aa, Homo sapiens; identical to SEQ ID NO: 20

SEQ ID NO: 25 - protein, 148 aa, Homo sapiens
MCFPKVLSDDMKKLKARMVMSSLAELEELTPLLEKERDGLRCRGNRSPVPDVEDPATEEPGESFCDKVMRWFQAMLQRLQTWWHGVLAWVKEKVVALVHAVQALWKQFQSFCCSLSELFMSSFQSYGAPRGDKEELTPQKCSEPQSSK

SEQ ID NO: 26 - protein, 234 aa, Homo sapiens; identical to SEQ ID NO: 20

SEQ ID NO: 27 - protein, 225 aa, Homo sapiens
MCFPKVLSDDMKKLKARMVMLLPTSAQGLGAWVSACDTEDTVGHLGPWRDKDPALWCQLCLSSQHQAIERFYDKMQNAESGRGQVMSSLAELEDDFKEGYLETVAAYYEEQHPELTPLLEKERDGLRCRGNRSPVPDVEDPATEEPGESFCDKVMRWFQAMLQRLQTWWHGVLAWVKEKVVALVHAVQALWKQFQSFCCSLSELFMSSFQSYGAPRGDKEELTPQ

SEQ ID NO: 28 - protein, 225 aa, Homo sapiens
MCFPKVLSDDMKKLKARMVMLLPTSAQGLGAWVSACDTEDTVGHLGPWRDKDPALWCQLCLSSQHQAIERFYDKMQNAESGRGQDDFKEGYLETVAAYYEEQHPELTPLLEKERDGLRCRGNRSPVPDVEDPATEEPGESFCDKVMRWFQAMLQRLQTWWHGVLAWVKEKVVALVHAVQALWKQFQSFCCSLSELFMSSFQSYGAPRGDKEELTPQKCSEPQSSK

SEQ ID NO: 29 - protein, 168 aa, Homo sapiens; identical to SEQ ID NO: 19

SEQ ID NO: 30 - protein, 212 aa, Homo sapiens
MCFPKGLGAWVSACDTEDTVGHLGPWRDKDPALWCQLCLSSQHQAIERFYDKMQNAESGRGQVMSSLAELEDDFKEGYLETVAAYYEEQHPELTPLLEKERDGLRCRGNRSPVPDVEDPATEEPGESFCDKVMRWFQAMLQRLQTWWHGVLAWVKEKVVALVHAVQALWKQFQSFCCSLSELFMSSFQSYGAPRGDKEELTPQKCSEPQSSK

SEQ ID NO: 31 - protein, 317 aa, Homo sapiens
MQEGELAISPISPVAAMPPLGTHVQARCEAQINLLGEGGICKLPGRLRIQPALWSREDVLHWLRWAEQEYSLPCTAEHGFEMNGRALCILTKDDFRHRAPSSGDVLYELLQYIKTQRRALVCGPFFGGIFRLKTPTQHSPVPPEEVTGPSQMDTRRGHLLQPPDPGLTSNFGHLDDPGLARWTPGKEESLNLCHCAELGCRTQGVCSFPAMPQAPIDGRIADCRLLWDYVYQLLLDTRYEPYIKWEDKDAKIFRVVDPNGLARLWGNHKNRVNMTYEKMSRALRHYYKLNIIKKEPGQKLLFRNGLQLIFIFIWSFQ

SEQ ID NO: 32 - protein, 262 aa, Homo sapiens
MQEGELAISPISPVAAMPPLGTHVQARCEAQINLLGEGGICKLPGRLRDVLYELLQYIKTQRRALVCGPFFGGIFRLKTPTQHSPVPPEEVTGPSQMDTRRGHLLQPPDPGLTSNFGHLDDPGLARWTPGKEESLNLCHCAELGCRTQGVCSFPAMPQAPIDGRIADCRLLWDYVYQLLLDTRYEPYIKWEDKDAKIFRVVDPNGLARLWGNHKNRVNMTYEKMSRALRHYYKLNIIKKEPGQKLLFRNGLQLIFIFIWSFQ

SEQ ID NO: 33 - protein, 888 aa, Homo sapiens
MKVARFQKIPNGENETMIPVLTSKKASELPVSEVASILQADLQNGLNKCEVSHRRAFHGWNEFDISEDEPLWKKYISQFKNPLIMLLLASAVISVLMHQFDDAVSITVAILIVVTVAFVQEYRSEKSLEELSKLVPPECHCVREGKLEHTLARDLVPGDTVCLSVGDRVPADLRLFEAVDLSIDESSLTGETTPCSKVTAPQPAATNGDLASRSNIAFMGTLVRCGKAKGVVIGTGENSEFGEVFKMMQAEEAPKTPLQKSMDLLGKQLSFYSFGIIGIIMLVGWLLGKDILEMFTISVSLAVAAIPEGLPIVVTVTLALGVMRMVKKRAIVKKLPIVETLGCCNVICSDKTGTLTKNEMTVTHIFTSDGLHAEVTGVGYNQFGEVIVDGDVVHGFYNPAVSRIVEAGCVCNDAVIRNNTLMGKPTEGALIALAMKMGLDGLQQDYIRKAEYPFSSEQKWMAVKCVHRTQQDRPEICFMKGAYEQVIKYCTTYQSKGQTLTLTQQQRDVYQQEKARMGSAGLRVLALASGPELGQLTFLGLVGIIDPPRTGVKEAVTTLIASGVSIKMITGDSQETAVAIASRLGLYSKTSQSVSGEEIDAMDVQQLSQIVPKVAVFYRASPRHKMKIIKSLQKNGSVVAMTGDGVNDAVALKAADIGVAMGQTGTDVCKEAADMILVDDDFQTIMSAIEEGKGIYNNIKNFVRFQLSTSIAALTLISLATLMNFPNPLNAMQILWINIIMDGPPAQSLGVEPVDKDVIRKPPRNWKDSILTKNLILKILVSSIIIVCGTLFVFWRELRDNVITPRDTTMTFTCFVFFDMFNALSSRSQTKSVFEIGLCSNRMFCYAVLGSIMGQLLVIYFPPLQKVFQTESLSILGLALGEEWTAAG

SEQ ID NO: 34 - protein, 949 aa, Homo sapiens
MKVARFQKIPNGENETMIPVLTSKKASELPVSEVASILQADLQNGLNKCEVSHRRAFHGWNEFDISEDEPLWKKYISQFKNPLIMLLLASAVISVLMHQFDDAVSITVAILIVVTVAFVQEYRSEKSLEELSKLVPPECHCVREGKLEHTLARDLVPGDTVCLSVGDRVPADLRLFEAVDLSIDESSLTGETTPCSKVTAPQPAATNGDLASRSNIAFMGTLVRCGKAKGVVIGTGENSEFGEVFKMMQAEEAPKTPLQKSMDLLGKQLSFYSFGIIGIIMLVGWLLGKDILEMFTISVSLAVAAIPEGLPIVVTVTLALGVMRMVKKRAIVKKLPIVETLGCCNVICSDKTGTLTKNEMTVTHIFTSDGLHAEVTGVGYNQFGEVIVDGDVVHGFYNPAVSRIVEAGCVCNDAVIRNNTLMGKPTEGALIALAMKMGLDGLQQDYIRKAEYPFSSEQKWMAVKCVHRTQQDRPEICFMKGAYEQVIKYCTTYQSKGQTLTLTQQQRDVYQQEKARMGSAGLRVLALASGPELGQLTFLGLVGIIDPPRTGVKEAVTTLIASGVSIKMITGDSQETAVAIASRLGLYSKTSQSVSGEEIDAMDVQQLSQIVPKVAVFYRASPRHKMKIIKSLQKNGSVVAMTGDGVNDAVALKAADIGVAMGQTGTDVCKEAADMILVDDDFQTIMSAIEEGKGIYNNIKNFVRFQLSTSIAALTLISLATLMNFPNPLNAMQILWINIIMDGPPAQSLGVEPVDKDVIRKPPRNWKDSILTKNLILKILVSSIIIVCGTLFVFWRELRDNVITPRDTTMTFTCFVFFDMFNALSSRSQTKSVFEIGLCSNRMFCYAVLGSIMGQLLVIYFPPLQKVFQTESLSILDLLFLLGLTSSVCIVAEIIKKVERSREKIQKHVSSTSSSFLEVWLWERSGQQLVEIHPHLETGLPLTEDVSCV

SEQ ID NO: 35 - protein, 939 aa, Homo sapiens
MKVARFQKIPNGENETMIPVLTSKKASELPVSEVASILQADLQNGLNKCEVSHRRAFHGWNEFDISEDEPLWKKYISQFKNPLIMLLLASAVISVLMHQFDDAVSITVAILIVVTVAFVQEYRSEKSLEELSKLVPPECHCVREGKLEHTLARDLVPGDTVCLSVGDRVPADLRLFEAVDLSIDESSLTGETTPCSKVTAPQPAATNGDLASRSNIAFMGTLVRCGKAKGVVIGTGENSEFGEVFKMMQAEEAPKTPLQKSMDLLGKQLSFYSFGIIGIIMLVGWLLGKDILEMFTISVSLAVAAIPEGLPIVVTVTLALGVMRMVKKRAIVKKLPIVETLGCCNVICSDKTGTLTKNEMTVTHIFTSDGLHAEVTGVGYNQFGEVIVDGDVVHGFYNPAVSRIVEAGCVCNDAVIRNNTLMGKPTEGALIALAMKMGLDGLQQDYIRKAEYPFSSEQKWMAVKCVHRTQQDRPEICFMKGAYEQVIKYCTTYQSKGQTLTLTQQQRDVYQQEKARMGSAGLRVLALASGPELGQLTFLGLVGIIDPPRTGVKEAVTTLIASGVSIKMITGDSQETAVAIASRLGLYSKTSQSVSGEEIDAMDVQQLSQIVPKVAVFYRASPRHKMKIIKSLQKNGSVVAMTGDGVNDAVALKAADIGVAMGQTGTDVCKEAADMILVDDDFQTIMSAIEEGKGIYNNIKNFVRFQLSTSIAALTLISLATLMNFPNPLNAMQILWINIIMDGPPAQSLGVEPVDKDVIRKPPRNWKDSILTKNLILKILVSSIIIVCGTLFVFWRELRDNVITPRDTTMTFTCFVFFDMFNALSSRSQTKSVFEIGLCSNRMFCYAVLGSIMGQLLVIYFPPLQKVFQTESLSILDLLFLLGLTSSVCIVAEIIKKVERSREKIQKHVWLWERSGQQLVEIHPHLETGLPLTEDVSCV

SEQ ID NO: 36 - protein, 919 aa, Homo sapiens
MKVARFQKIPNGENETMIPVLTSKKASELPVSEVASILQADLQNGLNKCEVSHRRAFHGWNEFDISEDEPLWKKYISQFKNPLIMLLLASAVISVLMHQFDDAVSITVAILIVVTVAFVQEYRSEKSLEELSKLVPPECHCVREGKLEHTLARDLVPGDTVCLSVGDRVPADLRLFEAVDLSIDESSLTGETTPCSKVTAPQPAATNGDLASRSNIAFMGTLVRCGKAKGVVIGTGENSEFGEVFKMMQAEEAPKTPLQKSMDLLGKQLSFYSFGIIGIIMLVGWLLGKDILEMFTISVSLAVAAIPEGLPIVVTVTLALGVMRMVKKRAIVKKLPIVETLGCCNVICSDKTGTLTKNEMTVTHIFTSDGLHAEVTGVGYNQFGEVIVDGDVVHGFYNPAVSRIVEAGCVCNDAVIRNNTLMGKPTEGALIALAMKMGLDGLQQDYIRKAEYPFSSEQKWMAVKCVHRTQQDRPEICFMKGAYEQVIKYCTTYQSKGQTLTLTQQQRDVYQQEKARMGSAGLRVLALASGPELGQLTFLGLVGIIDPPRTGVKEAVTTLIASGVSIKMITGDSQETAVAIASRLGLYSKTSQSVSGEEIDAMDVQQLSQIVPKVAVFYRASPRHKMKIIKSLQKNGSVVAMTGDGVNDAVALKAADIGVAMGQTGTDVCKEAADMILVDDDFQTIMSAIEEGKGIYNNIKNFVRFQLSTSIAALTLISLATLMNFPNPLNAMQILWINIIMDGPPAQSLGVEPVDKDVIRKPPRNWKDSILTKNLILKILVSSIIIVCGTLFVFWRELRDNVITPRDTTMTFTCFVFFDMFNALSSRSQTKSVFEIGLCSNRMFCYAVLGSIMGQLLVIYFPPLQKVFQTESLSILDLLFLLGLTSSVCIVAEIIKKVERSREKIQKHVSSTSSSFLEV

SEQ ID NO: 37 - protein, 944 aa, Homo sapiens
MDSLLPPSRFSYFKKYPLHAIRRYLSTLRNQRAEEQVARFQKIPNGENETMIPVLTSKKASELPVSEVASILQFKNPLIMLLLASAVISVLMHQFDDAVSITVAILIVVTVAFVQEYRSEKSLEELSKLVPPECHCVREGKLEHTLARDLVPGDTVCLSVGDRVPADLRLFEAVDLSIDESSLTGETTPCSKVTAPQPAATNGDLASRSNIAFMGTLVRCGKAKGVVIGTGENSEFGEVFKMMQAEEAPKTPLQKSMDLLGKQLSFYSFGIIGIIMLVGWLLGKDILEMFTISVSLAVAAIPEGLPIVVTVTLALGVMRMVKKRAIVKKLPIVETLGCCNVICSDKTGTLTKNEMTVTHIFTSDGLHAEVTGVGYNQFGEVIVDGDVVHGFYNPAVSRIVEAGCVCNDAVIRNNTLMGKPTEGALIALAMKMGLDGLQQDYIRKAEYPFSSEQKWMAVKCVHRTQQDRPEICFMKGAYEQVIKYCTTYQSKGQTLTLTQQQRDVYQQEKARMGSAGLRVLALASGPELGQLTFLGLVGIIDPPRTGVKEAVTTLIASGVSIKMITGDSQETAVAIASRLGLYSKTSQSVSGEEIDAMDVQQLSQIVPKVAVFYRASPRHKMKIIKSLQKNGSVVAMTGDGVNDAVALKAADIGVAMGQTGTDVCKEAADMILVDDDFQTIMSAIEEGKGIYNNIKNFVRFQLSTSIAALTLISLATLMNFPNPLNAMQILWINIIMDGPPAQSLGVEPVDKDVIRKPPRNWKDSILTKNLILKILVSSIIIVCGTLFVFWRELRDNVITPRDTTMTFTCFVFFDMFNALSSRSQTKSVFEIGLCSNRMFCYAVLGSIMGQLLVIYFPPLQKVFQTESLSILDLLFLLGLTSSVCIVAEIIKKVERSREKIQKHVSSTSSSFLEVWLWERSGQQLVEIHPHLETGLPLTEDVSCV

SEQ ID NO: 38 - protein, 215 aa, Homo sapiens
VTVTLALGVMRMVKKRAIVKKLPIVETLGCCNVICSDKTGTLTKNEMTVTHIFTSDGLHAEVTGVGYNQFGEVIVDGDVVHGFYNPAVSRIVEAGCVCNDAVIRNNTLMGKPTEGALIALAMKMGLDGLQQDYIRKAEYPFSSEQKWMAVKCVHRTQQDRPEICFMKGAYEQVIKYCTTYQSKGQTLTLTQQQRDVYQQEKARMGSAGLRVYLVF

SEQ ID NO: 39 - protein, 903 aa, Homo sapiens
  misc_feature (1)..(1): Xaa can be any naturally occurring amino acid
XKCEVSHRRAFHGWNEFDISEDEPLWKKYISQFKNPLIMLLLASAVISVLMHQFDDAVSITVAILIVVTVAFVQEYRSEKSLEELSKLVPPECHCVREGKLEHTLARDLVPGDTVCLSVGDRVPADLRLFEAVDLSIDESSLTGETTPCSKVTAPQPAATNGDLASRSNIAFMGTLVRCGKAKGVVIGTGENSEFGEVFKMMQAEEAPKTPLQKSMDLLGKQLSFYSFGIIGIIMLVGWLLGKDILEMFTISVSLAVAAIPEGLPIVVTVTLALGVMRMVKKRAIVKKLPIVETLGCCNVICSDKTGTLTKNEMTVTHIFTSDGLHAEVTGVGYNQFGEVIVDGDVVHGFYNPAVSRIVEAGCVCNDAVIRNNTLMGKPTEGALIALAMKMGLDGLQQDYIRKAEYPFSSEQKWMAVKCVHRTQQDRPEICFMKGAYEQVIKYCTTYQSKGQTLTLTQQQRDVYQQEKARMGSAGLRVLALASGPELGQLTFLGLVGIIDPPRTGVKEAVTTLIASGVSIKMITGDSQETAVAIASRLGLYSKTSQSVSGEEIDAMDVQQLSQIVPKVAVFYRASPRHKMKIIKSLQKNGSVVAMTGDGVNDAVALKAADIGVAMGQTGTDVCKEAADMILVDDDFQTIMSAIEEGKGIYNNIKNFVRFQLSTSIAALTLISLATLMNFPNPLNAMQILWINIIMDGPPAQSLGVEPVDKDVIRKPPRNWKDSILTKNLILKILVSSIIIVCGTLFVFWRELRDNVITPRDTTMTFTCFVFFDMFNALSSRSQTKSVFEIGLCSNRMFCYAVLGSIMGQLLVIYFPPLQKVFQTESLSILDLLFLLGLTSSVCIVAEIIKKVERSREKIQKHVSSTSSSFLEVWLWERSGQQLVEIHPHLETGLPLTEDVSCV

SEQ ID NO: 40 - protein, 903 aa, Homo sapiens
MIPVLTSKKASELPVSEVASILQADLQNGLNKCEVSHRRAFHGWNEFDISEDEPLWKKYISQFKNPLIMLLLASAVISVLMHQFDDAVSITVAILIVVTVAFVQEYRSEKSLEELSKLVPPECHCVREGKLEHTLARDLVPGDTVCLSVGDRVPADLRLFEAVDLSIDESSLTGETTPCSKVTAPQPAATNGDLASRSNIAFMGTLVRCGKAKGVVIGTGENSEFGEVFKMMQAEEAPKTPLQKSMDLLGKQLSFYSFGIIGIIMLVGWLLGKDILEMFTISVSLAVAAIPEGLPIVVTVTLALGVMRMVKKRAIVKKLPIVETLGCCNVICSDKTGTLTKNEMTVTHIFTSDGLHAEVTGVGYNQFGEVIVDGDVVHGFYNPAVSRIVEAGCVCNDAVIRNNTLMGKPTEGALIALAMKMGLDGLQQDYIRKAEYPFSSEQKWMAVKCVHRTQQDRPEICFMKGAYEQVIKYCTTYQSKGQTLTLTQQQRDVYQQEKARMGSAGLRVLALASGPELGQLTFLGLVGIIDPPRTGVKEAVTTLIASGVSIKMITGDSQETAVAIASRLGLYSKTSQSVSGEEIDAMDVQQLSQIVPKVAVFYRASPRHKMKIIKSLQKNGSVVAMTGDGVNDAVALKAADIGVAMGQTGTDVCKEAADMILVDDDFQTIMSAIEEGKGIYNNIKNFVRFQLSTSIAALTLISLATLMNFPNPLNAMQILWINIIMDGPPAQSLGVEPVDKDVIRKPPRNWKDSILTKNLILKILVSSIIIVCGTLFVFWRELRDNVITPRDTTMTFTCFVFFDMFNALSSRSQTKSVFEIGLCSNRMFCYAVLGSIMGQLLVIYFPPLQKVFQTESLSILDLLFLLGLTSSVCIVAEIIKKVERSREKIQKHVSSTSSSFLEV

SEQ ID NO: 41 - protein, 120 aa, Homo sapiens
MKVARFQKIPNGENETMIPVLTSKKASELPVSEVASILQADLQNGLNKCEVSHRRAFHGWNEFDISEDEPLWKKYISQFKNPLIMLLLASAVISVLMHQFDDAVSITVAILIVVTVAFVQ

SEQ ID NO: 42 - protein, 953 aa, Homo sapiens
MDSLLPPSRFSYFKKYPLHAIRRYLSTLRNQRAEEQVARFQKIPNGENETMIPVLTSKKASELPVSEVASILQADLQNGLNKCEVSHRRAFHGWNEFDISEDEPLWKKYISQFKNPLIMLLLASAVISVLMHQFDDAVSITVAILIVVTVAFVQEYRSEKSLEELSKLVPPECHCVREGKLEHTLARDLVPGDTVCLSVGDRVPADLRLFEAVDLSIDESSLTGETTPCSKVTAPQPAATNGDLASRSNIAFMGTLVRCGKAKGVVIGTGENSEFGEVFKMMQAEEAPKTPLQKSMDLLGKQLSFYSFGIIGIIMLVGWLLGKDILEMFTISVSLAVAAIPEGLPIVVTVTLALGVMRMVKKRAIVKKLPIVETLGCCNVICSDKTGTLTKNEMTVTHIFTSDGLHAEVTGVGYNQFGEVIVDGDVVHGFYNPAVSRIVEAGCVCNDAVIRNNTLMGKPTEGALIALAMKMGLDGLQQDYIRKAEYPFSSEQKWMAVKCVHRTQQDRPEICFMKGAYEQVIKYCTTYQSKGQTLTLTQQQRDVYQQEKARMGSAGLRVLALASGPELGQLTFLGLVGIIDPPRTGVKEAVTTLIASGVSIKMITGDSQETAVAIASRLGLYSKTSQSVSGEEIDAMDVQQLSQIVPKVAVFYRASPRHKMKIIKSLQKNGSVVAMTGDGVNDAVALKAADIGVAMGQTGTDVCKEAADMILVDDDFQTIMSAIEEGKGIYNNIKNFVRFQLSTSIAALTLISLATLMNFPNPLNAMQILWINIIMDGPPAQSLGVEPVDKDVIRKPPRNWKDSILTKNLILKILVSSIIIVCGTLFVFWRELRDNVITPRDTTMTFTCFVFFDMFNALSSRSQTKSVFEIGLCSNRMFCYAVLGSIMGQLLVIYFPPLQKVFQTESLSILDLLFLLGLTSSVCIVAEIIKKVERSREKIQKHVSSTSSSFLEV

SEQ ID NO: 43 - protein, 50 aa, Homo sapiens
LVDDDFQTIMSAIEEGKGIYNNIKNFVRFQLSTFCGSILLWMDPQLRALE

SEQ ID NO: 44 - protein, 973 aa, Homo sapiens
MDSLLPPSRFSYFKKYPLHAIRRYLSTLRNQRAEEQVARFQKIPNGENETMIPVLTSKKASELPVSEVASILQADLQNGLNKCEVSHRRAFHGWNEFDISEDEPLWKKYISQFKNPLIMLLLASAVISVLMHQFDDAVSITVAILIVVTVAFVQEYRSEKSLEELSKLVPPECHCVREGKLEHTLARDLVPGDTVCLSVGDRVPADLRLFEAVDLSIDESSLTGETTPCSKVTAPQPAATNGDLASRSNIAFMGTLVRCGKAKGVVIGTGENSEFGEVFKMMQAEEAPKTPLQKSMDLLGKQLSFYSFGIIGIIMLVGWLLGKDILEMFTISVSLAVAAIPEGLPIVVTVTLALGVMRMVKKRAIVKKLPIVETLGCCNVICSDKTGTLTKNEMTVTHIFTSDGLHAEVTGVGYNQFGEVIVDGDVVHGFYNPAVSRIVEAGCVCNDAVIRNNTLMGKPTEGALIALAMKMGLDGLQQDYIRKAEYPFSSEQKWMAVKCVHRTQQDRPEICFMKGAYEQVIKYCTTYQSKGQTLTLTQQQRDVYQQEKARMGSAGLRVLALASGPELGQLTFLGLVGIIDPPRTGVKEAVTTLIASGVSIKMITGDSQETAVAIASRLGLYSKTSQSVSGEEIDAMDVQQLSQIVPKVAVFYRASPRHKMKIIKSLQKNGSVVAMTGDGVNDAVALKAADIGVAMGQTGTDVCKEAADMILVDDDFQTIMSAIEEGKGIYNNIKNFVRFQLSTSIAALTLISLATLMNFPNPLNAMQILWINIIMDGPPAQSLGVEPVDKDVIRKPPRNWKDSILTKNLILKILVSSIIIVCGTLFVFWRELRDNVITPRDTTMTFTCFVFFDMFNALSSRSQTKSVFEIGLCSNRMFCYAVLGSIMGQLLVIYFPPLQKVFQTESLSILDLLFLLGLTSSVCIVAEIIKKVERSREKIQKHVWLWERSGQQLVEIHPHLETGLPLTEDVSCV

SEQ ID NO: 45 - protein, 82 aa, Homo sapiens
MIPVLTSKKASELPVSEVASILQADLQNGLNKCEVSHRRAFHGWNEFDISEDEPLWKKYISQFKNPLIMLLLASAVISVLMH

SEQ ID NO: 46 - protein, 919 aa, Homo sapiens; identical to SEQ ID NO: 36

SEQ ID NO: 47 - protein, 314 aa, Homo sapiens
  misc_feature (1)..(1): Xaa can be any naturally occurring amino acid
XEGALIALAMKMGLDGLQQDYIRKAEYPFSSEQKWMAVKCVHRTQQDRPEICFMKGAYEQVIKYCTTYQSKGQTLTLTQQQRDVYQQEKARMGSAGLRASRLGLYSKTSQSVSGEEIDAMDVQQLSQIVPKVAVFYRASPRHKMKIIKSLQKNGSVVAMTGDGVNDAVALKAADIGVAMGQTGTDVCKEAADMILVDDDFQTIMSAIEEGKGIYNNIKNFVRFQLSTSIAALTLISLATLMNFPNPLNAMQILWINIIMDGPPAQSLGVEPVDKDVIRKPPRNWKDSILTKNLILKILVSSIIIVCGTLFVFWR

SEQ ID NO: 48 - protein, 102 aa, Homo sapiens
MKVARFQKIPNGENETMIPVLTSKKASELPVSEVASILQADLQNGLNKCEVSHRRAFHGWNEFDISEDEPLWKKYISQFKNPLIMLLLASAVISVLMHQFDD

SEQ ID NO: 49 - protein, 919 aa, Homo sapiens; identical to SEQ ID NO: 36

SEQ ID NO: 50 - protein, 923 aa, Homo sapiens
MIPVLTSKKASELPVSEVASILQADLQNGLNKCEVSHRRAFHGWNEFDISEDEPLWKKYISQFKNPLIMLLLASAVISVLMHQFDDAVSITVAILIVVTVAFVQEYRSEKSLEELSKLVPPECHCVREGKLEHTLARDLVPGDTVCLSVGDRVPADLRLFEAVDLSIDESSLTGETTPCSKVTAPQPAATNGDLASRSNIAFMGTLVRCGKAKGVVIGTGENSEFGEVFKMMQAEEAPKTPLQKSMDLLGKQLSFYSFGIIGIIMLVGWLLGKDILEMFTISVSLAVAAIPEGLPIVVTVTLALGVMRMVKKRAIVKKLPIVETLGCCNVICSDKTGTLTKNEMTVTHIFTSDGLHAEVTGVGYNQFGEVIVDGDVVHGFYNPAVSRIVEAGCVCNDAVIRNNTLMGKPTEGALIALAMKMGLDGLQQDYIRKAEYPFSSEQKWMAVKCVHRTQQDRPEICFMKGAYEQVIKYCTTYQSKGQTLTLTQQQRDVYQQEKARMGSAGLRVLALASGPELGQLTFLGLVGIIDPPRTGVKEAVTTLIASGVSIKMITGDSQETAVAIASRLGLYSKTSQSVSGEEIDAMDVQQLSQIVPKVAVFYRASPRHKMKIIKSLQKNGSVVAMTGDGVNDAVALKAADIGVAMGQTGTDVCKEAADMILVDDDFQTIMSAIEEGKGIYNNIKNFVRFQLSTSIAALTLISLATLMNFPNPLNAMQILWINIIMDGPPAQSLGVEPVDKDVIRKPPRNWKDSILTKNLILKILVSSIIIVCGTLFVFWRELRDNVITPRDTTMTFTCFVFFDMFNALSSRSQTKSVFEIGLCSNRMFCYAVLGSIMGQLLVIYFPPLQKVFQTESLSILDLLFLLGLTSSVCIVAEIIKKVERSREKIQKHVWLWERSGQQLVEIHPHLETGLPLTEDVSCV

SEQ ID NO: 51 - protein, 131 aa, Homo sapiens
MDLLGKQLSFYSFGIIGIIMLVGWLLGKDILEMFTISVSLAVAAIPEGLPIVVTVTLALGVMRMVKKRAIVKKLPIVETLGCCNVICSDKTGTLTKNEMTVTHIFTSDGLHAEVTGVGYNQFGEVIVDGDV

SEQ ID NO: 52 - protein, 888 aa, Homo sapiens; identical to SEQ ID NO: 33

SEQ ID NO: 53 - protein, 233 aa, Homo sapiens [sequence omitted]

SEQ ID NO: 54 - protein, 220 aa, Homo sapiens
MLGIWTLLPLVLTSVARLSSKSVNAQVTDINSKGLELRKTVTTVETQNLEGLHHDGQFCHKPCPPGERKARDCTVNGDEPDCVPCQEGKEYTDKAHFSSKCRRCRLCDEGHGLEVEINCTRTQNTKCRCKPNFFCNSTVCEHCDPCTKCEHGIIKECTLTSNTKCKEEGSRSNLGWLCLLLLPIPLIVWVKRKEVQKTCRKHRKENQGSHESPTLNPMLT

SEQ ID NO: 55 - protein, 335 aa, Homo sapiens
MLGIWTLLPLVLTSVARLSSKSVNAQVTDINSKGLELRKTVTTVETQNLEGLHHDGQFCHKPCPPGERKARDCTVNGDEPDCVPCQEGKEYTDKAHFSSKCRRCRLCDEGHGLEVEINCTRTQNTKCRCKPNFFCNSTVCEHCDPCTKCEHGIIKECTLTSNTKCKEEGSRSNLGWLCLLLLPIPLIVWVKRKEVQKTCRKHRKENQGSHESPTLNPETVAINLSDVDLSKYITTIAGVMTLSQVKGFVRKNGVNEAKIDEIKNDNVQDTAEQKVQLLRNWHQLHGKKEAYDTLIKDLKKANLCTLAEKIQTIILKDITSDSENSNFRNEIQSLV

SEQ ID NO: 56 - protein, 314 aa, Homo sapiens
MLGIWTLLPLVLTSVARLSSKSVNAQVTDINSKGLELRKTVTTVETQNLEGLHHDGQFCHKPCPPGERKARDCTVNGDEPDCVPCQEGKEYTDKAHFSSKCRRCRLCDEGHGLEVEINCTRTQNTKCRCKPNFFCNSTVCEHCDPCTKCEHGIIKECTLTSNTKCKEEVKRKEVQKTCRKHRKENQGSHESPTLNPETVAINLSDVDLSKYITTIAGVMTLSQVKGFVRKNGVNEAKIDEIKNDNVQDTAEQKVQLLRNWHQLHGKKEAYDTLIKDLKKANLCTLAEKIQTIILKDITSDSENSNFRNEIQSLV

SEQ ID NO: 57 - protein, 86 aa, Homo sapiens
MLGIWTLLPLVLTSVARLSSKSVNAQVTDINSKGLELRKTVTTVETQNLEGLHHDGQFCHKPCPPDVNMESSRNAHSPATPSAKRK

SEQ ID NO: 58 - protein, 103 aa, Homo sapiens
MLGIWTLLPLVLTSVARLSSKSVNAQVTDINSKGLELRKTVTTVETQNLEGLHHDGQFCHKPCPPDVNMESSRNAHSPATPSAKRKDPDLTWGGFVFFFCQFH

SEQ ID NO: 59 - protein, 149 aa, Homo sapiens
MLGIWTLLPLVLTSVARLSSKSVNAQVTDINSKGLELRKTVTTVETQNLEGLHHDGQFCHKPCPPGERKARDCTVNGDEPDCVPCQEGKEYTDKAHFSSKCRRCRLCDEGHDVNMESSRNAHSPATPSAKRKDPDLTWGGFVFFFCQFH

SEQ ID NO: 60 - protein, 132 aa, Homo sapiens
MLGIWTLLPLVLTSVARLSSKSVNAQVTDINSKGLELRKTVTTVETQNLEGLHHDGQFCHKPCPPGERKARDCTVNGDEPDCVPCQEGKEYTDKAHFSSKCRRCRLCDEGHDVNMESSRNAHSPATPSAKRK

SEQ ID NO: 61 - protein, 149 aa, Homo sapiens; identical to SEQ ID NO: 59

SEQ ID NO: 62 - protein, 244 aa, Homo sapiens
MLGIWTLLPLVLTSVARLSSKSVNAQVTDINSKGLELRKTVTTVETQNLEGLHHDGQFCHKPCPPGERKARDCTVNGDEPDCVPCQEGKEYTDKAHFSSKCRRCRLCDEGHGLEVEINCTRTQNTKCRCKPNFFCNSTVCEHCDPCTKCEHGIIKECTLTSNTKCKEEGSRSNLGWLCLLLLPIPLIVWVKRKEVQKTCRKHRKENQGSHESPTLNPMESCSIAQAGVQGCNHGSLQPQSPGLK

SEQ ID NO: 63 - protein, 373 aa, Homo sapiens
MLRSVWNFLKRHKKKCIFLGTVLGGVYILGKYGQKKIREIQEREAAEYIAQARRQYHFESNQRTCNMTVLSMLPTLREALMQQLNSESLTALLKNRPSNKLEIWEDLKIISFTRSTVAVYSTCMLVVLLRVQLNIIGGYIYLDNAAVGKNGTTILAPPDVQQQYLSSIQHLLGDGLTELITVIKQAVQKVLGSVSLKHSLSLLDLEQKLKEIRNLVEQHKSSSWINKDGSKPLLCHYMMPDEETPLAVQACGLSPRDITTIKLLNETRDMLESPDFSTVLNTCLNRGFSRLLDNMAEFFRPTEQDLQHGNSMNSLSSVSLPLAKIIPIVNGQIHSVCSETPSHFVQDLLTMEQVKDFAANVYEAFSTPQQLEK

SEQ ID NO: 64 - protein, 182 aa, Homo sapiens
MLRSVWNFLKRHKKKCIFLGTVLGVLSMLPTLREALMQQLNSESLTALLKNRPSNKLEIWEDLKIISFTRSTVAVYSTCMLVVLLRVQLNIIGGYIYLDNAAVGKNGTTILAPPDVQQQYLSSIQHLLGDGLTELITVIKQAVQKVLGSVSLKHSLSLLDLEQKLKEIRNLVEQHKSSSWIN

SEQ ID NO: 65 - protein, 188 aa, Homo sapiens
MPGKHQHFQEPEVGCCGKYFLFGFNIVFWFSVFLGLIFFLELATGILAFVFKDWIRDQLNLFINNNVKAYRDDIDLQNLIDFAQEYEDVLNTQCGYDVRLKLELEQQGFIHTKGCVGQFEKWLQDNLIVVAGVFMGIALLQVPLWPHVPLPLPGPPSLSPHLSSVLQIFGICLAQNLVSDIKAVKANW

SEQ ID NO: 66 - protein, 332 aa, Homo sapiens
MPGKHQHFQEPEVGCCGKYFLFGFNIVFWVLGALFLAIGLWAWGEKGVLSNISALTDLGGLDPVWLFVVVGGVMSVLGFAGCIGALRENTFLLKFFSVFLGLIFFLELATGILAFVFKDWIRDQLNLFINNNVKAYRDDIDLQNLIDFAQEYWSCCGARGPNDWNLNIYFNCTDLNPSRERCGVPFSCCVRDPAEDVLNTQCGYDVRLKLVRGELEQQGFIHTKGCVGQFEKWLQDNLIVVAGVFMGIALLQIFGICLAQNLVSDIKAVKANWSKWNDDFENHWLTPTISEVLSTAGPQQNSLTGAPGPAPPSRHVFFGLGGLYPEPTFKNW

SEQ ID NO: 67 - protein, 58 aa, Homo sapiens
MPGKHQHFQEPEVGCCGKYFLFGFNIVFWVSAGCWEPCSWLSASGPGVRRAFSRTSQR

SEQ ID NO: 68 - protein, 309 aa, Homo sapiens
MPGKHQHFQEPEVGCCGKYFLFGFNIVFWVLGALFLAIGLWAWGEKGVLSNISALTDLGGLDPVWLFVVVGGVMSVLGFAGCIGALRENTFLLKFDWIRDQLNLFINNNVKAYRDDIDLQNLIDFAQEYWSCCGARGPNDWNLNIYFNCTDLNPSRERCGVPFSCCVRDPAEDVLNTQCGYDVRLKLVRGELEQQGFIHTKGCVGQFEKWLQDNLIVVAGVFMGIALLQIFGICLAQNLVSDIKAVKANWSKWNDDFENHWLTPTISEVLSTAGPQQNSLTGAPGPAPPSRHVFFGLGGLYPEPTFKNW

SEQ ID NO: 69 - protein, 257 aa, Homo sapiens
MPGKHQHFQEPEVGCCGKYFLFGFNIVFWVLGALFLAIGLWAWGEKGVLSNISALTDLGGLDPVWLFVVVGGVMSVLGFAGCIGALRENTFLLKFLATGILAFVFKDWIRDQLNLFINNNVKAYRDDIDLQNLIDFAQEYWSCCGARGPNDWNLNIYFNCTDLNPSRERCGVPFSCCVRDPAEDVLNTQCGYDVRLKLELEQQGFIHTKGCVGQFEKWLQDNLIVVAGVFMGIALLQIFGICLAQNLVSDIKAVKAN

SEQ ID NO: 70 - protein, 203 aa, Homo sapiens
  misc_feature (1)..(1): Xaa can be any naturally occurring amino acid
XGKHQHFQEPEVGCCGKYFLFGFNIVFWFSVFLGLIFFLELATGILAFVFKDWIRDQLNLFINNNVKAYRDDIDLQNLIDFAQEYWSCCGARGPNDWNLNIYFNCTDLNPSRERCGVPFSCCVRDPAEDVLNTQCGYDVRLKLELEQQGFIHTKGCVGQFEKWLQDNLIVVAGVFMGIALLQIFGICLAQNLVSDIKAVKANW

SEQ ID NO: 71 - protein, 329 aa, Homo sapiens
MPGKHQHFQEPEVGCCGKYFLFGFNIVFWVLGALFLAIGLWAWGEKGVLSNISALTDLGGLDPVWLFVVVGGVMSVLGFAGCIGALRENTFLLKFFSVFLGLIFFLELATGILAFVFKDWIRDQLNLFINNNVKAYRDDIDLQNLIDFAQEYWSCCGARGPNDWNLNIYFNCTDLNPSRERCGVPFSCCVRDPAEDVLNTQCGYDVRLKLELEQQGFIHTKGCVGQFEKWLQDNLIVVAGVFMGIALLQIFGICLAQNLVSDIKAVKANWSKWNDDFENHWLTPTISEVLSTAGPQQNSLTGAPGPAPPSRHVFFGLGGLYPEPTFKNW

SEQ ID NO: 72 - protein, 263 aa, Homo sapiens
MPGKHQHFQEPEVGCCGKYFLFGFNIVFWVLGALFLAIGLWAWGEKGVLSNISALTDLGGLDPVWLFVVVGGVMSVLGFAGCIGALRENTFLLKFFSVFLGLIFFLELATGILAFVFKDWIRDQLNLFINNNVKAYRDDIDLQNLIDFAQEYWSCCGARGPNDWNLNIYFNCTDLNPSRERCGVPFSCCVRDPAEDVLNTQCGYDVRLKLELEQQGFIHTKGCVGQFEKWLQDNLIVVAGVFMGIALLQIFGICLAQNLEQME

SEQ ID NO: 73 - protein, 83 aa, Homo sapiens
MAAATASPRSLLVLLQVVVLALAQIRGPPGERGPPGPPGPPGVPGSDGIDGPPGPVGLPGEIGIRGPKGDPGPDGPSGPPGPP

SEQ ID NO: 74 - protein, 689 aa, Homo sapiens
MAAATASPRSLLVLLQVVVLALAQIRGPPGERGPPGPPGPPGVPGSDGIDGDNGPPGKAGPPGPKGEPGKAGPDGPDGKPGIDGLTGAKGEPGPMGIPGVKGQPGLPGPPGLPGPGFAGPPGPPGPVGLPGEIGIRGPKGDPGPDGPSGPPGPPGKPGRPGTIQGLEGSADFLCPTNCPPGMKGPPGLQGVKGHAGKRGILGDPGHQGKPGPKGDVGASGEQGIPGPPGPQGIRGYPGMAGPKGETGPHGYKGMVGAIGATGPPGEEGPRGPPGRAGEKGDEGSPGIRGPQGITGPKGATGPPGINGKDGTPGTPGMKGSAGQAGQPGSPGHQGLAGVPGQPGTKGGPGDQGEPGPQGLPGFSGPPGKEGEPGPRGEIGPQGIMGQKGDQGERGPVGQPGPQGRQGPKGEQGPPGIPGPQGLPGVKGDKGSPGKTGPRGKVGDPGVAGLPGEKGEKGESGEPGPKGQQGVRGEPGYPGPSGDAGAPGVQGYPGPPGPRGLAGNRGVPGQPGRQGVEGRDATDQHIVDVALKMLQEQLAEVAVSAKREALGAVGMMGPPGPPGPPGYPGKQGPHGHPGPRGVPGIVGAVGQIGNTGPKGKRGEKGDPGEVGRGHPGMPGPPGIPGLPGRPGQAINGKDGDRGSPGAPGEAGRPGLPGPVGLPGFCEPAACLGASAYASARLTEPGSIKGP

SEQ ID NO: 75 - protein, 226 aa, Homo sapiens
  misc_feature (1)..(1): Xaa can be any naturally occurring amino acid
XSPFRGPPGAAGARRGPPGERGPPGPPGPPGVPGSDGIDGDNGPPGKAGPPGPKGEPGKAGPDGPDGKPGIDGLTGAKGEPGPMGIPGVKGQPGLPGPPGLPGPGFAGPPGPPGPVGLPGEIGIRGPKGDPGPDGPSGPPGPPGKPGRPGTIQGLEGSADFLCPTNCPPGMKGPPGLQGVKGHAGKRGILGDPGHQGKPGPKGDVGASGEQGIPGPPGPQGIRGYP

SEQ ID NO: 76 - protein, 694 aa, Homo sapiens
MKHLKRWWSAGGGLLHLTLLLSLAGLRVDLDLYLLLPPPTLLQDELLFLGGPASSAYALSPFSASGGWGRAGHLHPKGRELDPAAPPEGQLLREVRALGVPFVPRTSVDAWLVHSVAAGSADEAHGLLGAAAASSTGGAGASVDGGSQAVQGGGGDPRAARSGPLDAGEEEKAPAEPTAQVPDAGGCASEENGVLREKHEAVDHSSQHEENEERVSAQKENSLQQNDDDENKIAEKPDWEAEKTTESRNERHLNGTDTSFSLEDLFQLLSSQPENSLEGISLGDIPLPGSISDGMNSSAHYHVNFSQAISQDVNLHEAILLCPNNTFRRDPTARTSQSQEPFLQLNSHTTNPEQTLPGTNLTGFLSPVDNHMRNLTSQDLLYDLDINIFDEINLMSLATEDNFDPIDVSQLFDEPDSDSGLSLDSSHNNTSVIKSNSSHSVCDEGAIGYCTDHESSSHHDLEGAVGGYYPEPSKLCHLDQSDSDFHGDLTFQHVFHNHTYHLQPTAPESTSEPFPWPGKSQKIRSRYLEDTDRNLSRDEQRAKALHIPFSVDEIVGMPVDSFNSMLSRYYLTDLQVSLIRDIRRRGKNKVAAQNCRKRKLDIILNLEDDVCNLQAKKETLKREQAQCNKAINIMKQKLHDLYHDIFSRLRDDQGRPVNPNHYALQCTHDGSILIVPKELVASGHKKETQKGKRK

SEQ ID NO: 77 - protein, 86 aa, Homo sapiens
CNCGLVFHLQDPWVPTGPGAVQKQREHPPDYQWYALDQLPPDVQHKANESAILSTACFYGLVRPPRSGLYKLSYNQNPTSILIKYT

SEQ ID NO: 78 - protein, 1722 aa, Homo sapiens
MRTGWATPRRPAGLLMLLFWFFDLAEPSGRAANDPFTIVHGNTGKCIKPVYGWIVADDCDETEDKLWKWVSQHRLFHLHSQKCLGLDITKSVNELRMFSCDSSAMLWWKCEHHSLYGAARYRLALKDGHGTAISNASDVWKKGGSEESLCDQPYHEIYTRDGNSYGRPCEFPFLIDGTWHHDCILDEDHSGPWCATTLNYEYDRKWGICLKPENGCEDNWEKNEQFGSCYQFNTQTALSWKEAYVSCQNQGADLLSINSAAELTYLKEKEGIAKIFWIGLNQLYSARGWEWSDHKPLNFLNWDPDRPSAPTIGGSSCARMDAESGLWQSFSCEAQLPYVCRKPLNNTVELTDVWTYSDTRCDAGWLPNNGFCYLLVNESNSWDKAHAKCKAFSSDLISIHSLADVEVVVTKLHNEDIKEEVWIGLKNINIPTLFQWSDGTEVTLTYWDENEPNVPYNKTPNCVSYLGELGQWKVQSCEEKLKYVCKRKGEKLNDASSDKMCPPDEGWKRHGETCYKIYEDEVPFGTNCNLTITSRFEQEYLNDLMKKYDKSLRKYFWTGLRDVDSCGEYNWATVGGRRRAVTFSNWNFLEPASPGGCVAMSTGKSVGKWEVKDCRSFKALSICKKMSGPLGPEEASPKPDDPCPEGWQSFPASLSCYKVFHAERIVRKRNWEEAERFCQALGAHLSSFSHVDEIKEFLHFLTDQFSGQHWLWIGLNKRSPDLQGSWQWSDRTPVSTIIMPNEFQQDYDIRDCAAVKVFHRPWRRGWHFYDDREFIYLRPFACDTKLEWVCQIPKGRTPKTPDWYNPDRAGIHGPPLIIEGSEYWFVADLHLNYEEAVLYCASNHSFLATITSFVGLKAIKNKIANISGDGQKWWIRISEWPIDDHFTYSRYPWHRFPVTFGEECLYMSAKTWLIDLGKPTDCSTKLPFICEKYNVSSLEKYSPDSAAKVQCSEQWIPFQNKCFLKIKPVSLTFSQASDTCHSYGGTLPSVLSQIEQDFITSLLPDMEATLWIGLRWTAYEKINKWTDNRELTYSNFHPLLVSGRLRIPENFFEEESRYHCALILNLQKSPFTGTWNFTSCSERHFVSLCQKYSEVKSRQTLQNASETVKYLNNLYKIIPKTLTWHSAKRECLKSNMQLVSITDPYQQAFLSVQALLHNSSLWIGLFSQDDELNFGWSDGKRLHFSRWAETNGQLEDCVVLDTDGFWKTVDCNDNQPGAICYYSGNETEKEVKPVDSVKCPSPVLNTPWIPFQNCCYNFIITKNRHMATTQDEVHTKCQKLNPKSHILSIRDEKENNFVLEQLLYFNYMASWVMLGITYRNKSLMWFDKTPLSYTHWRAGRPTIKNEKFLAGLSTDGFWDIQTFKVIEEAVYFHQHSILACKIEMVDYKEEYNTTLPQFMPYEDGIYSVIQKKVTWYEALNMCSQSGGHLASVHNQNGQLFLEDIVKRDGFPLWVGLSSHDGSESSFEWSDGSTFDYIPWKGQTSPGNCVLLDPKGTWKHEKCNSVKDGAICYKPTKSKKLSRLTYSSRCPAAKENGSRWIQYKGHCYKSDQALHSFSEAKKLCSKHDHSATIVSIKDEDENKFVSRLMRENNNITMRVWLGLSQHSVDQSWSWLDGSEVTFVKWENKSKSGVGRCSMLIASNETWKKVECEHGFGRVVCKVPLGPDYTAIAIIVATLSILVLMGGLIWFLFQRHRLHLAGFSSVRYAQGVNEDEIMLPSFHD

SEQ ID NO: 79 - protein, 306 aa, Homo sapiens
MAAVDDLQFEEFGNAATSLTANPDATTVNIEDPGETPKHQPGSPRGSGREEDDELLGNDDSDKTELLAGQKKSSPFWTFEYYQTFFDVDTYQVFDRIKGSLLPIPGKNFVRLYIRSNPDLYGPFWICATLVFAIAISGNLSNFLIHLGEKTYHYVPEFRKVSIAATIIYAYAWLVPLALWGFLMWRNSKVMNIVSYSFLEIVCVYGYSLFIYIPTAILWIIPQKAVRWILVMIALGISGSLLAMTFWPAVREDNRRVALATIVTIVLLHMLLSVGCLAYFFDAPEMDHLPTTTATPNQTVAAAKSS

SEQ ID NO: 80 - protein, 123 aa, Homo sapiens
MWRNSKVMNIVSYSFLEIVCVYGYSLFIYIPTAILWIIPQKAVRWILVMIALGISGSLLAMTFWPAVREDNRRVALATIVTIVLLHMLLSVGCLAYFFDAPEMDHLPTTTATPNQTVAAAKSS

SEQ ID NO: 81 - protein, 217 aa, Homo sapiens
MAAVDDLQFEEFGNAATSLTANPDATTVNIEDPGETPKHQPGSPRGSGREEDDELLGNDDSDKTELLAGQKKSSPFWTFEYYQTFFDVDTYQVFDRIKGSLLPIPGKNFVRLYIRSNPDLYGPFWICATLVFAIAISGNLSNFLIHLGEKTYHYVPEFRKVSIAATIIYAYAWLVPLALWGFLMWRNSKVMNIVSYSFLEIVCVYGYSLFIYIPTAV

SEQ ID NO: 82 - protein, 306 aa, Homo sapiens; identical to SEQ ID NO: 79

SEQ ID NO: 83 - protein, 298 aa, Homo sapiens
MAAAEPAVLALPNSGAGGAGAPSGTVPVLFCFSVFARPSSVPHGAGYELLIQKFLSLYGDQIDMHRKFVVQLFAEEWGQYVDLPKGFAVSERCKVRLVPLQIQLTTLGNLTPSSTVFFCCDMQERFRPAIKYFGDIISVGQRLLQGARILGIPVIVTEQYPKGLGSTVQEIDLTGVKLVLPKTKFSMVLPEVEAALAEIPGVRSVVLFGVETHVCIQQTALELVGRGVEVHIVADATSSRSMMDRMFALERLARTGIIVTTSEAVLLQLVADKDHPKFKEIQNLIKASAPESGLLSKV

SEQ ID NO: 84 - protein, 188 aa, Homo sapiens
MAAAEPAVLALPNSGAGGAGAPSGTVPVLFCFSVFARPSSVPHGAGYELLIQKFLSLYGDQIDMHRKFVVQLFAEEWGQYVDLPKGFAVSERCKLTTLGNLTPSSTVFFCCDMQERFRPAIKYFGDIISVGQRLLQGARILGIPVIVTEQYPKGLGSTVQEIDLTGVKLVLPKTKFSMVLPEVEAALA

SEQ ID NO: 85 - protein, 711 aa, Homo sapiens
MKLKLNVLTIILLPVHLLITIYSALIFIPWYFLTNAKKKNAMAKRIKAKPTSDKPGSPYRSVTHFDSLAVIDIPGADTLDKLFDHAVSKFGKKDSLGTREILSEENEMQPNGKVFKKLILGNYKWMNYLEVNRRVNNFGSGLTALGLKPKNTIAIFCETRAEWMIAAQTCFKYNFPLVTLYATLGKEAVVHGLNESEASYLITSVELLESKLKTALLDISCVKHIIYVDNKAINKAEYPEGFEIHSMQSVEELGSNPENLGIPPSRPTPSDMAIVMYTSGSTGRPKGVMMHHSNLIAGMTGQCERIPGLGPKDTYIGYLPLAHVLELTAEISCFTYGCRIGYSSPLTLSDQSSKIKKGSKGDCTVLKPTLMAAVPEIMDRIYKNVMSKVQEMNYIQKTLFKIGYDYKLEQIKKGYDAPLCNLLLFKKVKALLGGNVRMMLSGGAPLSPQTHRFMNVCFCCPIGQGYGLTESCGAGTVTEVTDYTTGRVGAPLICCEIKLKDWQEGGYTINDKPNPRGEIVIGGQNISMGYFKNEEKTAEDYSVDENGQRWFCTGDIGEFHPDGCLQIIDRKKDLVKLQAGEYVSLGKVEAALKNCPLIDNICAFAKSDQSYVISFVVPNQKRLTLLAQQKGVEGTWVDICNNPAMEAEILKEIREAANAMKLERFEIPIKVRLSPEPWTPETGLVTDAFKLKRKELRNHYLKDIERMYGGK

SEQ ID NO: 86 - protein, 711 aa, Homo sapiens; identical to SEQ ID NO: 85

SEQ ID NO: 87 - protein, 54 aa, Homo sapiens
MKLKLNVLTIILLPVHLLITIYSALIFIPWYFLTNAKKKNAMAKRIKAKPTSDK

SEQ ID NO: 88 - protein, 145 aa, Homo sapiens
MKLKLNVLTIILLPVHLLITIYSALIFIPWYFLTNAKKKNAMAKRIKAKPTSDKPGSPYRSVTHFDSLAVIDIPGADTLDKLFDHAVSKFGKKDSLGTREILSEENEMQPNGKVFKKLILGNYKWMNYLEVNRRVNNFGSGLTAL

SEQ ID NO: 89 - protein, 126 aa, Homo sapiens
MKLKLNVLTIILLPVHLLITIYSALIFIPWYFLTNAKKKNAMAKRIKAKPTSDKPGSPYRSVTHFDSLAVIDIPGADTLDKLFDHAVSKFGKKDSLGTREILSEENEMQPNGKVFKKLILGNYKWM

SEQ ID NO: 90 - protein, 128 aa, Homo sapiens
MKLKLNVLTIILLPVHLLITIYSALIFIPWYFLTNAKKKNAMAKRIKAKPTSDKPGSPYRSVTHFDSLAVIDIPGADTLDKLFDHAVSKFGKKDSLGTREILSEENEMQPNGKVFKKLILGNYKWMNY

SEQ ID NO: 91 - protein, 80 aa, Homo sapiens
NLVRMRSQALGQSAPSLTASLKELSLPRRGSLIDSQKWNCLVKRSLSPTPSSPGSPCSPLLAFHFWSPVCPNAGRTSPLG

SEQ ID NO: 92 - protein, 58 aa, Homo sapiens
MAKVAKDLNPGVKKMSLGQLQSARGVACLGCKGTCSGFEPHSWRDCSTWSSSPRRSSQ

SEQ ID NO: 93 - protein, 760 aa, Homo sapiens
MMDQARSAFSNLFGGEPLSYTRFSLARQVDGDNSHVEMKLAVDEEENADNNTKANVTKPKRCSGSICYGTIAVIVFFLIGFMIGYLGYCKGVEPKTECERLAGTESPVREEPGEDFPAARRLYWDDLKRKLSEKLDSTDFTGTIKLLNENSYVPREAGSQKDENLALYVENQFREFKLSKVWRDQHFVKIQVKDSAQNSVIIVDKNGRLVYLVENPGGYVAYSKAATVTGKLVHANFGTKKDFEDLYTPVNGSIVIVRAGKITFAEKVANAESLNAIGVLIYMDQTKFPIVNAELSFFGHAHLGTGDPYTPGFPSFNHTQFPPSRSSGLPNIPVQTISRAAAEKLFGNMEGDCPSDWKTDSTCRMVTSESKNVKLTVSNVLKEIKILNIFGVIKGFVEPDHYVVVGAQRDAWGPGAAKSGVGTALLLKLAQMFSDMVLKDGFQPSRSIIFASWSAGDFGSVGATEWLEGYLSSLHLKAFTYINLDKAVLGTSNFKVSASPLLYTLIEKTMQNVKHPVTGQFLYQDSNWASKVEKLTLDNAAFPFLAYSGIPAVSFCFCEDTDYPYLGTTMDTYKELIERIPELNKVARAAAEVAGQFVIKLTHDVELNLDYERYNSQLLSFVRDLNQYRADIKEMGLSLQWLYSARGDFFRATSRLTTDFGNAEKTDRFVMKKLNDRVMRVEYHFLSPYVSPKESPFRHVFWGSGSHTLPALLENLKLRKQNNGAFNETLFRNQLALATWTIQGAANALSGDVWDIDNEF

SEQ ID NO: 94 - protein, 760 aa, Homo sapiens; identical to SEQ ID NO: 93

SEQ ID NO: 95 - protein, 81 aa, Homo sapiens
MMDQARSAFSNLFGGEPLSYTRFSLARQVDGDNSHVEMKLAVDEEENADNNTKANVTKPKRCSGSICYGTIAVIVFFLIGC

SEQ ID NO: 96 - protein, 118 aa, Homo sapiens
AAAEVAGQFVIKLTHDVELNLDYERYNSQLLSFVRDLNQYRADIKEMGLSLQWLYSARGDFFRATSRLTTDFGNAEKTDRFVMKKLNDRVMREGPQMMLLLTDARPSNHFLSPLLSLH

SEQ ID NO: 97 - protein, 643 aa, Homo sapiens
MHHLLEQSADMATALLAGEKLRELILPGAQDDKAGALAALLLQLKLELPFDRVVTIGTVLVPILLVTLVFTKNFAEEPIYCYTPHNFTRDQALYARGYCWTELRDALPGVDASLWPSLFEHKFLPYALLAFAAIMYVPALGWEFLASTRLTSELNFLLQEIDNCYHRAAEGRAPKIEKQIQSKGPGITEREKREIIENAEKEKSPEQNLFEKYLERRGRSNFLAKLYLARHVLILLLSAVPISYLCTYYATQKQNEFTCALGASPDGAAGAGPAVRVSCKLPSVQLQRIIAGVDIVLLCVMNLIILVNLIHLFIFRKSNFIFDKLHKVGIKTRRQWRRSQFCDINILAMFCNENRDHIKSLNRLDFITNESDLMYDNVVRQLLAALAQSNHDATPTVRDSGVQTVDPSANPAEPDGAAEPPVVKRPRKKMKWIPTSNPLPQPFKEPLAIMRVENSKAEKPKPARRKTATDTLIAPLLDRSAHHYKGGGGDPGPGPAPAPAPPPAPDKKHARHFSLDVHPYILGTKKAKAEAVPAALPASRSQEGGFLSQAEDCGLGLAPAPIKDAPLPEKEIPYPTEPARAGLPSGGPFHVRSPPAAPAVAPLTPASLGKAEPLTILSRNATHPLLHINTLSSSPPSTSRERS

SEQ ID NO: 98 - protein, 677 aa, Homo sapiens
MHHLLEQSADMATALLAGEKLRELILPGAQDDKAGALAALLLQLKLELPFDRVVTIGTVLVPILLVTLVFTKNFAEEPIYCYTPHNFTRDQALYARGYCWTELRDALPGVDASLWPSLFEHKFLPYALLAFAAIMYVPALGWEFLASTRLTSELNFLLQEIDNCYHRAAEGRAPKIEKQIQSKGPGITEREKREIIENAEKEKSPEQNLFEKYLERRGRSNFLAKLYLARHVLILLLSAVPISYLCTYYATQKQNEFTCALGASPDGAAGAGPAVRVSCKLPSVQLQRIIAGVDIVLLCVMNLIILVNLIHLFIFRKSNFIFDKLHKVGIKTRRQWRRSQFCDINILAMFCNENRDHIKSLNRLDFITNESDLMYDNVVRQLLAALAQSNHDATPTVRDSGVQTVDPSANPAEPDGAAEPPVVKRPRKKMKWIPTSNPLPQPFKEPLAIMRVENSKAEKPKPARRKTATDTLIAPLLDRSAHHYKGGGGDPGPGPAPAPAPPPAPDKKHARHFSLDVHPYILGTKKAKAEAVPAALPASRSQEGGFLSQAEDCGLGLAPAPIKDAPLPEKEIPYPTEPARAGLPSGGPFHVRSPPAAPAVAPLTPASLGKAEPLTILSRNATHPLLHINTLYEAREEEDGGPRLPQDVGDLIAIPAPQQILIATFDEPRTVVSTVEF

SEQ ID NO: 99 - protein, 77 aa, Homo sapiens
MATALLAGEKLRELILPGAQDDKAGALAALLLQLKLELPFDRVVTIGTVLVPILLVTLVFTKNFAGWTLFSGSWDWL

SEQ ID NO: 100 - protein, 1204 aa, Homo sapiens
MYVTMMMTDQIPLELPPLLNGEVAMMPHLVNGDAAQQVILVQVNPGETFTIRAEDGTLQCIQGPAEVPMMSPNGSIPPIHVPPGYISQVIEDSTGVRRVVVTPQSPECYPPSYPSAMSPTHHLPPYLTHHPHFIHNSHTAYYPPVTGPGDMPPQFFPQHHLPHTIYGEQEIIPFYGMSTYITREDQYSKPPHKKLKDRQIDRQNRLNSPPSSIYKSSCTTVYNGYGKGHSGGSGGGGSGSGPGIKKTERRARSSPKSNDSDLQEYELEVKRVQDILSGIEKPQVSNIQARAVVLSWAPPVGLSCGPHSGLSFPYSYEVALSDKGRDGKYKIIYSGEELECNLKDLRPATDYHVRVYAMYNSVKGSCSEPVSFTTHSCAPECPFPPKLAHRSKSSLTLQWKAPIDNGSKITNYLLEWDEGKRNSGFRQCFFGSQKHCKLTKLCPAMGYTFRLAARNDIGTSGYSQEVVCYTLGNIPQMPSAPRLVRAGITWVTLQWSKPEGCSPEEVITYTLEIQEDENDNLFHPKYTGEDLTCTVKNLKRSTQYKFRLTASNTEGKSCPSEVLVCTTSPDRPGPPTRPLVKGPVTSHGFSVKWDPPKDNGGSEILKYLLEITDGNSEANQWEVAYSGSATEYTFTHLKPGTLYKLRACCISTGGHSQCSESLPVRTLSIAPGQCRPPRVLGRPKHKEVHLEWDVPASESGCEVSEYSVEMTEPEDVASEVYHGPELECTVGNLLPGTVYRFRVRALNDGGYGPYSDVSEITTAAGPPGQCKAPCISCTPDGCVLVGWESPDSSGADISEYRLEWGEDEESLELIYHGTDTRFEIRDLLPAAQYCCRLQAFNQAGAGPYSELVLCQTPASAPDPVSTLCVLEEEPLDAYPDSPSACLVLNWEEPCNNGSEILAYTIDLGDTSITVGNTTMHVMKDLLPETTYRIRIQAINEIGAGPFSQFIKAKTRPLPPLPPRLECAAAGPQSLKLKWGDSNSKTHAAEDIVYTLQLEDRNKRFISIYRGPSHTYKVQRLTEFTCYSFRIQAASEAGEGPFSETYTFSTTKSVPPTIKAPRVTQLEGNSCEILWETVPSMKGDPVNYILQVLVGRESEYKQVYKGEEATFQISGLQTNTDYRFRVCACRRCLDTSQELSGAFSPSAAFVLQRSEVMLTGDMGSLDDPKMKSMMPTDEQFAAIIVLGFATLSILFAFILQYFLMK

SEQ ID NO: 101 - protein, 1204 aa, Homo sapiens; identical to SEQ ID NO: 100

SEQ ID NO: 102 - protein, 1204 aa, Homo sapiens; identical to SEQ ID NO: 100

SEQ ID NO: 103 - protein, 71 aa, Homo sapiens
MYVTMMMTDQIPLELPPLLNGEVAMMPHLVNGDAAQQVILVQVNPGETFTIRAEDGTLQCIQDEVVKRACD

SEQ ID NO: 104 - protein, 71 aa, Homo sapiens; identical to SEQ ID NO: 103

SEQ ID NO: 105 - protein, 862 aa, Homo sapiens
MAHTFRGCSLAFMFIITWLLIKAKIDACKRGDVTVKPSHVILLGSTVNITCSLKPRQGCFHYSRRNKLILYKFDRRINFHHGHSLNSQVTGLPLGTTLFVCKLACINSDEIQICGAEIFVGVAPEQPQNLSCIQKGEQGTVACTWERGRDTHLYTEYTLQLSGPKNLTWQKQCKDIYCDYLDFGINLTPESPESNFTAKVTAVNSLGSSSSLPSTFTFLDIVRPLPPWDIRIKFQKASVSRCTLYWRDEGLVLLNRLRYRPSNSRLWNMVNVTKAKGRHDLLDLKPFTEYEFQISSKLHLYKGSWSDWSESLRAQTPEEEPTGMLDVWYMKRHIDYSRQQISLFWKNLSVSEARGKILHYQVTLQELTGGKAMTQNITGHTSWTTVIPRTGNWAVAVSAANSKGSSLPTRINIMNLCEAGLLAPRQVSANSEGMDNILVTWQPPRKDPSAVQEYVVEWRELHPGGDTQVPLNWLRSRPYNVSALISENIKSYICYEIRVYALSGDQGGCSSILGNSKHKAPLSGPHINAITEEKGSILISWNSIPVQEQMGCLLHYRIYWKERDSNSQPQLCEIPYRVSQNSHPINSLQPRVTYVLWMTALTAAGESSHGNEREFCLQGKANWMAFVAPSICIAIIMVGIFSTHYFQQKVFVLLAALRPQWCSREIPDPANSTCAKKYPIAEEKTQLPLDRLLIDWPTPEDPEPLVISEVLHQVTPVFRHPPCSNWPQREKGIQGHQASEKDMMHSASSPPPPRALQAESRQLVDLYKVLESRGSDPKPENPACPWTVLPAGDLPTHDGYLPSNIDDLPSHEAPLADSLEELEPQHISLSVFPSSSLHPLTFSCGDKLTLDQLKMRCDSLML

SEQ ID NO: 106 - protein, 659 aa, Homo sapiens
MAHTFRGCSLAFMFIITWLLIKAKIDACKRGDVTVKPSHVILLGSTVNITCSLKPRQGCFHYSRRNKLILYKFDRRINFHHGHSLNSQVTGLPLGTTLFVCKLACINSDEIQICGAEIFVGVAPEQPQNLSCIQKGEQGTVACTWERGRDTHLYTEYTLQLSGPKNLTWQKQCKDIYCDYLDFGINLTPESPESNFTAKVTAVNSLGSSSSLPSTFTFLDIVRPLPPWDIRIKFQKASVSRCTLYWRDEGLVLLNRLRYRPSNSRLWNMVNVTKAKGRHDLLDLKPFTEYEFQISSKLHLYKGSWSDWSESLRAQTPEEEPTGMLDVWYMKRHIDYSRQQISLFWKNLSVSEARGKILHYQVTLQELTGGKAMTQNITGHTSWTTVIPRTGNWAVAVSAANSKGSSLPTRINIMNLCEAGLLAPRQVSANSEGMDNILVTWQPPRKDPSAVQEYVVEWRELHPGGDTQVPLNWLRSRPYNVSALISENIKSYICYEIRVYALSGDQGGCSSILGNSKHKAPLSGPHINAITEEKGSILISWNSIPVQEQMGCLLHYRIYWKERDSNSQPQLCEIPYRVSQNSHPINSLQPRVTYVLWMTALTAAGESSHGNEREFCLQGKANWMAFVAPSICIAIIMVGIFSTHYFQQKRRHSCPWTGS

SEQ ID NO: 107 - protein, 230 aa, Homo sapiens
  misc_feature (1)..(1): Xaa can be any naturally occurring amino acid
XQKGEQGTVACTWERGRDTHLYTEYTLQLSGPKNLTWQKQCKDIYCDYLDFGINLTPESPESNFTAKVTAVNSLGSSSSLPSTFTFLDIVRPLPPWDIRIKFQKASVSRCTLYWRDEGLVLLNRLRYRPSNSRLWNMVNVTKAKGRHDLLDLKPFTEYEFQISSKLHLYKGSWSDWSESLRAQTPEEEPTGMLDVWYMKRHIDYSRQQISLFWKVSFKRQLKTQGNKTEG

SEQ ID NO: 108 - protein, 635 aa, Homo sapiens
MAHTFRGCSLAFMFIITWLLIKAKIDACKRGDVTVKPSHVILLGSTVNITCSLKPRQGCFHYSRRNKLILYKFDRRINFHHGHSLNSQVTGLPLGTTLFVCKLACINSDEIQICGAEIFVGVAPEQPQNLSCIQKGEQGTVACTWERGRDTHLYTEYTLQLSGPKNLTWQKQCKDIYCDYLDFGINLTPESPESNFTAKVTAVNSLGSSSSLPSTFTFLDIVRPLPPWDIRIKFQKASVSRCTLYWRDEGLVLLNRLRYRPSNSRLWNMVNVTKAKGRHDLLDLKPFTEYEFQISSKLHLYKGSWSDWSESLRAQTPEEEPTGMLDVWYMKRHIDYSRQQISLFWKNLSVSEARGKILHYQVTLQELTGGKAMTQNITGHTSWTTVIPRTGNWAVAVSAANSKGSSLPTRINIMNLCEAGLLAPRQVSANSEGMDNILVTWQPPRKDPSAVQEYVVEWRELHPGGDTQVPLNWLRSRPYNVSALISENIKSYICYEIRVYALSGDQGGCSSILGNSKHKAPLSGPHINAITEEKGSILISWNSIPVQEQMGCLLHYRIYWKERDSNSQPQLCEIPYRVSQNSHPINSLQPRVTYVLWMTALTAAGESSHGNEREFCLQGEDTAALGQAPDRLAHA

SEQ ID NO: 109 - protein, 776 aa, Homo sapiens
MAHTFRGCSLAFMFIITWLLIKAKIDACKRGDVTVKPSHVILLGSTVNITCSLKPRQGCFHYSRRNKLILYKFDRRINFHHGHSLNSQVTGLPLGTTLFVCKLACINSDEIQICGAEIFVGVAPEQPQNLSCIQKGEQGTVACTWERGRDTHLYTEYTLQLSGPKNLTWQKQCKDIYCDYLDFGINLTPESPESNFTAKVTAVNSLGSSSSLPSTFTFLDIVRPLPPWDIRIKFQKASVSRCTLYWRDEGLVLLNRLRYRPSNSRLWNMVNVTKAKGRHDLLDLKPFTEYEFQISSKLHLYKGSWSDWSESLRAQTPEEEPTGMLDVWYMKRHIDYSRQQISLFWKNLSVSEARGKILHYQVTLQELTGGKAMTQNITGHTSWTTVIPRTGNWAVAVSAANSKGSSLPTRINIMNLCEAGLLAPRQVSANSEGMDNILVTWQPPRKDPSAVQEYVVEWRELHPGGDTQVPLNWLRSRPYNVSALISEIPYRVSQNSHPINSLQPRVTYVLWMTALTAAGESSHGNEREFCLQGKANWMAFVAPSICIAIIMVGIFSTHYFQQKVFVLLAALRPQWCSREIPDPANSTCAKKYPIAEEKTQLPLDRLLIDWPTPEDPEPLVISEVLHQVTPVFRHPPCSNWPQREKGIQGHQASEKDMMHSASSPPPPRALQAESRQLVDLYKVLESRGSDPKPENPACPWTVLPAGDLPTHDGYLPSNIDDLPSHEAPLADSLEELEPQHISLSVFPSSSLHPLTFSCGDKLTLDQLKMRCDSLML

SEQ ID NO: 110 - protein, 370 aa, Homo sapiens
MLPRRLLAAWLAGTRGGGLLALLANQCRFVTGLRVRRAQQIAQLYGRLYSESSRRVLLGRLWRRLHGRPGHASALMAALAGVFVWDEERIQEEELQRSINEMKRLEEMSNMFQSSGVQHHPPEPKAQTEGNEDSEGKEQRWEMVMDKKHFKLWRRPITGTHLYQYRVFGTYTDVTPRQFFNVQLDTEYRKKWDALVIKLEVIERDVVSGSEVLHWVTHFPYPMYSRDYVYVRRYSVDQENNMMVLVSRAVEHPSVPESPEFVRVRSYESQMVIRPHKSFDENGFDYLLTYSDNPQTVFPRYCVSWMVSSGMPDFLEKLHMATLKAKNMEIKVKDYISAKPLEMSSEAKATSQSSERKNEGSCGPARIEYA

SEQ ID NO: 111 - protein, 154 aa, Homo sapiens
MVSKAKVIVNGWLFPACLGFCLSESFFMVKGAALFLQQGSSPQGQRSLQHPHKHAGDLPQHLQVMINLLRCEDRIKLAVRLESAWADRVRYMVVVYSSGRQDTEENILLGVDFSSKESKSCTIGMVLRLWSDTKIHLDGDGGFSVSTAGRMHIF

SEQ ID NO: 112 - protein, 37 aa, Homo sapiens
MALVTLQRSPTPSAASSSASNSELEAGSEEDRKLNLR

SEQ ID NO: 113 - protein, 147 aa, Homo sapiens
MAGNSILLAAVSILSACQQSYFALQVGKARLKYKVTPPAVTGSPEFERVFRAQQNCVEFYPIFIITLWMAGWYFNQVFATCLGLVYIYGRHLYFWGYSEAAKKRITGFRLSLGILALLTLLGALGIANSFLDEYLDLNIAKKLRRQF

SEQ ID NO: 114 - protein, 147 aa, Homo sapiens; identical to SEQ ID NO: 113

SEQ ID NO: 115 - protein, 77 aa, Homo sapiens
MAGNSILLAAVSILSACQQSYFALQVGKARLKYKVTPPAVTGSPEFERVFRAHFCYLSGSGVHIWPSPILLGIFRSC

SEQ ID NO: 116 - protein, 147 aa, Homo sapiens; identical to SEQ ID NO: 113

SEQ ID NO: 117 - protein, 110 aa, Homo sapiens
MFKSPLKVPALIQCLGMYDSSLAAKYLLHSLVFGSAVYSSGSERHLTYIQKIFRMEIFGCFALTELSHGSNTKAIRTTAHYDPATEEFIIHSPDFEAAKFWVGNMGKTAT

SEQ ID NO: 118 - protein, 121 aa, Homo sapiens
  misc_feature (1)..(1): Xaa can be any naturally occurring amino acid
XGHQNVFPNHISVGTNRKRCLEDSEDFGVKKARTEAQSLDSAVPLTNGDTEDDADKMHVDREFAVVTGGSGQFPVSCNNNPMVEDTKQQESGSVGPKEIEIYTVSAMQTPCRCRNQYAYYF

SEQ ID NO: 119 - protein, 37 aa, Homo sapiens
MGVQVETISPGDGRTFPKRGQTCVVHYTGGDCILVNE

SEQ ID NO: 120 - protein, 129 aa, Homo sapiens
MGVQVETISPGDGRTFPKRGQTCVVHYTGMLEDGKKFDSSRDRNKPFKFMLGKQEVIRGWEEGVAQVCSLICFVLLSSIYLLYFFIGGIFIRFKNKKSEKSHPHAIPSDQYPHKKLLLLMFLVLWFKHI

SEQ ID NO: 121 - protein, 97 aa, Homo sapiens
MGVQVETISPGDGRTFPKRGQTCVVHYTDECGSESQTDYISRLCLWCHWAPRHHPTTCHSRLRCGASKTGMTGMASSLSSLFLDLPWRDLVPPDMCT

SEQ ID NO: 122 - protein, 276 aa, Homo sapiens
MPVPASWPHPPGPFLLLTLLLGLTEVAGEEELQMIQPEKLLLVTVGKTATLHCTVTSLLPVGPVLWFRGVGPGRELIYNQKEGHFPRVTTVSDLTKRNNMDFSIRISSITPADVGTYYCVKFRKGSPENVEFKSGPGTEMALGAKPSAPVVLGPAARTTPEHTVSFTCESHGFSPRDITLKWFKNGNELSDFQTNVDPTGQSVAYSIRSTARVVLDPWDVRSQVICEVAHVTLQGDPLRGTANLSEAIRGPASSLTALLLIAVLLGPIYVPWKQKT

SEQ ID NO: 123 - protein, 387 aa, Homo sapiens
MPVPASWPHPPGPFLLLTLLLGLTEVAGEEELQMIQPEKLLLVTVGKTATLHCTVTSLLPVGPVLWFRGVGPGRELIYNQKEGHFPRVTTVSDLTKRNNMDFSIRISSITPADVGTYYCVKFRKGSPENVEFKSGPGTEMALGAKPSAPVVLGPAARTTPEHTVSFTCESHGFSPRDITLKWFKNGNELSDFQTNVDPTGQSVAYSIRSTARVVLDPWDVRSQVICEVAHVTLQGDPLRGTANLSEAIRVPPTLEVTQQPMRVGNQVNVTCQVRKFYPQSLQLTWSENGNVCQRETASTLTENKDGTYNWTSWFLVNISDQRDDVVLTCQVKHDGQLAVSKRLALEVTVHQKDQSSDATPGPASSLTALLLIAVLLGPIYVPWKQKT

SEQ ID NO: 124 - protein, 170 aa, Homo sapiens
MPVPASWPHPPGPFLLLTLLLGLTEVAGEEELQMIQPEKLLLVTVGKTATLHCTVTSLLPVGPVLWFRGVGPGRELIYNQKEGHFPRVTTVSDLTKRNNMDFSIRISSITPADVGTYYCVKFRKGSPENVEFKSGPGTEMALGGPASSLTALLLIAVLLGPIYVPWKQKT

SEQ ID NO: 125 - protein, 354 aa, Homo sapiens
MIQPEKLLLVTVGKTATLHCTVTSLLPVGPVLWFRGVGPGRELIYNQKEGHFPRVTTVSDLTKRNNMDFSIRISSITPADVGTYYCVKFRKGSPENVEFKSGPGTEMALGAKPSAPVVLGPAARTTPEHTVSFTCESHGFSPRDITLKWFKNGNELSDFQTNVDPTGQSVAYSIRSTARVVLDPWDVRSQVICEVAHVTLQGDPLRGTANLSEAIRVPPTLEVTQQPMRVGNQVNVTCQVRKFYPQSLQLTWSENGNVCQRETASTLTENKDGTYNWTSWFLVNISDQRDDVVLTCQVKHDGQLAVSKRLALEVTVHQKDQSSDATPGPASSLTALLLIAVLLGPIYVPWKQKT

SEQ ID NO: 126 - protein, 276 aa, Homo sapiens; identical to SEQ ID NO: 122

SEQ ID NO: 127 - protein, 556 aa, Homo sapiens
MHGSLEALLFLPQVTLSLAHAHLICSNAQLEMCVFPHRFLGDLTTEGINKPGFYKGPAGSQVTLSSLGNQTRVLLEEQARHLLNEQEHATMAYYLDEYRGGSVSVEALVMALFKLLNTHAKFSLLSEVRGTISPQDLERFDHLVLRREIESMKARQPPGPGAGDTYSMVSYSDTGSSTGSHGTSTTVSSARNTLDLEETGEAVQGNINALPDVSVDDVRSTSQGLSSFKPLPRPPPLAQGNDLPLGQPRKLGREDLQPPSSMPSCSGTVFSAPQNRSPPAGTAPTPGTSSAQDLPSSPIYASVSPANPSSKRPLDAHLALVNQHPIGPFPRVQSPPHLKSPSAEATVAGGCLLPPSPSGHPDQTGTNQHFVMVEVHRPDSEPDVNEVRALPQTRTASTLSQLSDSGQTLSEDSGVDAGEAEASAPGRGRQSVSTKSRSSKELPRNERPTDGANKPPGLLEPTSTLVRVKKSAATLGIAIEGGANTRQPLPRIVTIQRGGSAHNCGQLKVGHVILEVNGLTLRGKEHREAARIIAEAFKTKDRDYIDFLVTEFNVML

SEQ ID NO: 128 - protein, 180 aa, Homo sapiens
MSVLRPLDKLPGLNTATILLVGTEDALLQQLADSMLKEDCASELKVHLAKSLPLPSSVNRPRIDLIVFVVNLHSKYSLQNTEESLRHVDASFFLGKVCFLATGAGRESHCSIHRHTVVKLAHTYQSPLLYCDLEVEGFRATMAQRLVRVLQICAGHVPGVSALNLLSLLRSSEGPSLEDL

SEQ ID NO: 129 - protein, 146 aa, Homo sapiens
MLKEDCASELKVHLAKSLPLPSSVNRPRIDLIVFVVNLHSKYSLQNTEESLRHVDASFFLGKVCFLATGAGRESHCSIHRHTVVKLAHTYQSPLLYCDLEVEGFRATMAQRLVRVLQICAGHVPGVSALNLLSLLRSSEGPSLEDL

SEQ ID NO: 130 - protein, 125 aa, Homo sapiens
MLKEDCASELKVHLAKSLPLPSSVNRPRIDLIVFVVNLHSKYRIREARTSAFSVVKFCSLVCFLTLAWPPQSPEHRGVPAPCGCQLLLGEGVFPRHRCWAGEPLQHSPAHRGEAGPHLSKPPALL

SEQ ID NO: 131 - protein, 73 aa, Homo sapiens
MLKEDCASELKVHLAKSLPLPSSVNRPRIDLIVFVVNLHSKYSLQNTEESLRHVDASFFLGKVCFLATGGGRL

SEQ ID NO: 132 - protein, 107 aa, Homo sapiens
MSVLRPLDKLPGLNTATILLVGTEDALLQQLADSMLKEDCASELKVHLAKSLPLPSSVNRPRIDLIVFVVNLHSKYSLQNTEESLRHVDASFFLGKVCFLATGGGRL

SEQ ID NO: 133 - protein, 166 aa, Homo sapiens
MRIPALNAYMKSLLSLPVWVLMDEDVRIFFYQSPYDSEQVPQALRRLRPRTRKVKSVSPQGNSVDRMAAPRAEALFDFTGNSKLELNFKAGDVIFLLSRINKDWLEGTVRGATGIFPLSFVKILKDFPEEDDPTNWLRCYYYEDTISTIKSVAWEGGACPAFLPSL

SEQ ID NO: 134 - protein, 889 aa, Homo sapiens
MVLAQGLLSMALLALCWERSLAGAEETIPLQTLRCYNDYTSHITCRWADTQDAQRLVNVTLIRRVNEDLLEPVSCDLSDDMPWSACPHPRCVPRRCVIPCQSFVVTDVDYFSFQPDRPLGTRLTVTLTQHVQPPEPRDLQISTDQDHFLLTWSVALGSPQSHWLSPGDLEFEVVYKRLQDSWEDAAILLSNTSQATLGPEHLMPSSTYVARVRTRLAPGSRLSGRPSKWSPEVCWDSQPGDEAQPQNLECFFDGAAVLSCSWEVRKEVASSVSFGLFYKPSPDAGEEECSPVLREGLGSLHTRHHCQIPVPDPATHGQYIVSVQPRRAEKHIKSSVNIQMAPPSLNVTKDGDSYSLRWETMKMRYEHIDHTFEIQYRKDTATWKDSKTETLQNAHSMALPALEPSTRYWARVRVRTSRTGYNGIWSEWSEARSWDTESVLPMWVLALIVIFLTIAVLLALRFCGIYGYRLRRKWEEKIPNPSKSHLFQNGSAELWPPGSMSAFTSGSPPHQGPWGSRFPELEGVFPVGFGDSEVSPLTIEDPKHVCDPPSGPDTTPAASDLPTEQPPSPQPGPPAASHTPEKQASSFDFNGPYLGPPHSRSLPDILGQPEPPQEGGSQKSPPPGSLEYLCLPAGGQVQLVPLAQAMGPGQAVEVERRPSQGAAGSPSLESGGGPAPPALGPRVGGQDQKDSPVAIPMSSGDTEDPGVASGYVSSADLVFTPNSGASSVSLVPSLGLPSDQTPSLCPGLASGPPGAPGPVKSGFEGYVELPPIEGRSPRSPRNNPVPPEAKSPVLNPGERPADVSPTSPQPEGLLVLQQVGDYCFLPGLGPGPLSLRSKPSSPGPGPEIKNLDQAFQVKKPPGQAVPQVPVIQLFKALVVSVMSVGPPVP

SEQ ID NO: 135 - protein, 897 aa, Homo sapiens
MVLAQGLLSMALLALCWERSLAGAEETIPLQTLRCYNDYTSHITCRWADTQDAQRLVNVTLIRRVNEDLLEPVSCDLSDDMPWSACPHPRCVPRRCVIPCQSFVVTDVDYFSFQPDRPLGTRLTVTLTQHVQPPEPRDLQISTDQDHFLLTWSVALGSPQSHWLSPGDLEFEVVYKRLQDSWEDAAILLSNTSQATLGPEHLMPSSTYVARVRTRLAPGSRLSGRPSKWSPEVCWDSQPGDEAQPQNLECFFDGAAVLSCSWEVRKEVASSVSFGLFYKPSPDAGEEECSPVLREGLGSLHTRHHCQIPVPDPATHGQYIVSVQPRRAEKHIKSSVNIQMAPPSLNVTKDGDSYSLRWETMKMRYEHIDHTFEIQYRKDTATWKDSKTETLQNAHSMALPALEPSTRYWARVRVRTSRTGYNGIWSEWSEARSWDTESVLPMWVLALIVIFLTIAVLLALRFCGIYGYRLRRKWEEKIPNPSKSHLFQNGSAELWPPGSMSAFTSGSPPHQGPWGSRFPELEGVFPVGFGDSEVSPLTIEDPKHVCDPPSGPDTTPAASDLPTEQPPSPQPGPPAASHTPEKQASSFDFNGPYLGPPHSRSLPDILGQPEPPQEGGSQKSPPPGSLEYLCLPAGGQVQLVPLAQAMGPGQAVEVERRPSQGAAGSPSLESGGGPAPPALGPRVGGQDQKDSPVAIPMSSGDTEDPGVASGYVSSADLVFTPNSGASSVSLVPSLGLPSDQTPSLCPGLASGPPGAPGPVKSGFEGYVELPPIEGRSPRSPRNNPVPPEAKSPVLNPGERPADVSPTSPQPEGLLVLQQVGDYCFLPGLGPGPLSLRSKPSSPGPGPEIKNLDQAFQVKKPPGQAVPQVPVIQLFKALKQQDYLSLPPWEVNKPGEVC

SEQ ID NO: 136 - protein, 903 aa, Homo sapiens
MVLAQGLLSMALLALCWERSLAGAEETIPLQTLRCYNDYTSHITCRWADTQDAQRLVNVTLIRRVNEDLLEPVSCDLSDDMPWSACPHPRCVPRRCVIPCQSFVVTDVDYFSFQPDRPLGTRLTVTLTQHVQPPEPRDLQISTDQDHFLLTWSVALGSPQSHWLSPGDLEFEVVYKRLQDSWEDAAILLSNTSQATLGPEHLMPSSTYVARVRTRLAPGSRLSGRPSKWSPEVCWDSQPGDEAQPQNLECFFDGAAVLSCSWEVRKEVASSVSFGLFYKPSPDAGSAVLLREEECSPVLREGLGSLHTRHHCQIPVPDPATHGQYIVSVQPRRAEKHIKSSVNIQMAPPSLNVTKDGDSYSLRWETMKMRYEHIDHTFEIQYRKDTATWKDSKTETLQNAHSMALPALEPSTRYWARVRVRTSRTGYNGIWSEWSEARSWDTESVLPMWVLALIVIFLTIAVLLALRFCGIYGYRLRRKWEEKIPNPSKSHLFQNGSAELWPPGSMSAFTSGSPPHQGPWGSRFPELEGVFPVGFGDSEVSPLTIEDPKHVCDPPSGPDTTPAASDLPTEQPPSPQPGPPAASHTPEKQASSFDFNGPYLGPPHSRSLPDILGQPEPPQEGGSQKSPPPGSLEYLCLPAGGQVQLVPLAQAMGPGQAVEVERRPSQGAAGSPSLESGGGPAPPALGPRVGGQDQKDSPVAIPMSSGDTEDPGVASGYVSSADLVFTPNSGASSVSLVPSLGLPSDQTPSLCPGLASGPPGAPGPVKSGFEGYVELPPIEGRSPRSPRNNPVPPEAKSPVLNPGERPADVSPTSPQPEGLLVLQQVGDYCFLPGLGPGPLSLRSKPSSPGPGPEIKNLDQAFQVKKPPGQAVPQVPVIQLFKALKQQDYLSLPPWEVNKPGEVC

SEQ ID NO: 137 - protein, 229 aa, Homo sapiens
MPWSACPHPRCVPRRCVIPCQSFVVTDVDYFSFQPDRPLGTRLTVTLTQHVQPPEPRDLQISTDQDHFLLTWSVALGSPQSHWLSPGDLEFEVVYKRLQDSWEDAAILLSNTSQATLGPEHLMPSSTYVARVRTRLAPGSRLSGRPSKWSPEVCWDSQPGDEAQPQNLECFFDGAAVLSCSWEVRKEVASSVSFGLFYKPSPDAGEEECSPVLREGLGSLHTRHHCQIP

SEQ ID NO: 138 - protein, 144 aa, Homo sapiens
MAFTFAAFCYMLALLLTAALIFFAIWHIIAFDELKTDYKNPIDQCNTLNPLVLPEYLIHAFFCVMFLCAAEWLTLGLNMPLLAYHIWRYMSRPVMSGPGLYDPTTIMNADILAYCQKEGWCKLAFYLLAFFYYLYGMIYVLVSS

SEQ ID NO: 139 - protein, 96 aa, Homo sapiens
MAFTFAAFCYMLALLLTAALIFFAIWHIIAFDELKTDYKNPIDQCNTLNPLVLPEYLIHAFFCVMFLCAAEWLTLGLNMPLLAYHIWSMIYVLVSS

SEQ ID NO: 140 - protein, 121 aa, Homo sapiens
MAFTFAAFCYMLALLLTAALIFFAIWHLVLPEYLIHAFFCVMFLCAAEWLTLGLNMPLLAYHIWRYMSRPVMSGPGLYDPTTIMNADILAYCQKEGWCKLAFYLLAFFYYLYGMIYVLVSS

SEQ ID NO: 141 - protein, 33 aa, Homo sapiens
MAFTFAAFCYMLALLLTAALIFFAIWHDKEEFG

SEQ ID NO: 142 - protein, 136 aa, Homo sapiens
MAFTFAAFCYMLALLLTAALIFFAIWHIIAFDELKTDYKNPIDQCNTLNPLVLPEYLIHAFFCVMFLCAAEWLTLGLNMPLLAYHIWRYMSRPVMSGPGLYDPTTIMNADILAYCQKEGWCKLAFYLLAFFYYLYG

SEQ ID NO: 143 - protein, 53 aa, Homo sapiens
MAFTFAAFCYMLALLLTAALIFFAIWHIIAFDELKTDYKNPIDQCNTLNPVYE

SEQ ID NO: 144 - protein, 160 aa, Homo sapiens
MAFTFAAFCYMLALLLTAALIFFAIWHIIAFDELKTDYKNPIDQCNTLNPTVEKVKKIKRVKIALKLVLPEYLIHAFFCVMFLCAAEWLTLGLNMPLLAYHIWRYMSRPVMSGPGLYDPTTIMNADILAYCQKEGWCKLAFYLLAFFYYLYGMIYVLVSS

SEQ ID NO: 145 - protein, 435 aa, Homo sapiens
MAAPLVLVLVVAVTVRAALFRSSLAEFISERVEVVSPLSSWKRVVEGLSLLDLGVSPYSGAVFHETPLIIYLFHFLIDYAELVFMITDALTAIALYFAIQDFNKVVFKKQKLLLELDQYAPDVAELIRTPMEMRYIPLKVALFYLLNPYTILSCVAKSTCAINNTLIAFFILTTIKGSAFLSAIFLALATYQSLYPLTLFVPGLLYLLQRQYIPVKMKSKAFWIFSWEYAMMYVGSLVVIICLSFFLLSSWDFIPAVYGFILSVPDLTPNIGLFWYFFAEMFEHFSLFFVCVFQINVFFYTIPLAIKLKEHPIFFMFIQIAVIAIFKSYPTVGDVALYMAFFPVWNHLYRFLRNIFVLTCIIIVCSLLFPVLWHLWIYAGSANSNFFYAITLTFNVGQILLISDYFYAFLRREYYLTHGLYLTAKDGTEAMLVLK

SEQ ID NO: 146 - protein, 415 aa, Homo sapiens
MAAPLVLVLVVAVTVRAALFRSSLAEFISERVEVVSPLSSWKRVVEGLSLLDLGVSPYSGAVFHEITDALTAIALYFAIQDFNKVVFKKQKLLLELDQYAPDVAELIRTPMEMRYIPLKVALFYLLNPYTILSCVAKSTCAINNTLIAFFILTTIKGSAFLSAIFLALATYQSLYPLTLFVPGLLYLLQRQYIPVKMKSKAFWIFSWEYAMMYVGSLVVIICLSFFLLSSWDFIPAVYGFILSVPDLTPNIGLFWYFFAEMFEHFSLFFVCVFQINVFFYTIPLAIKLKEHPIFFMFIQIAVIAIFKSYPTVGDVALYMAFFPVWNHLYRFLRNIFVLTCIIIVCSLLFPVLWHLWIYAGSANSNFFYAITLTFNVGQILLISDYFYAFLRREYYLTHGLYLTAKDGTEAMLVLK

SEQ ID NO: 147 - protein, 170 aa, Homo sapiens [sequence omitted]

SEQ ID NO: 148 - protein, 336 aa, Homo sapiens
MARRRSQRVCASGPSMLNSARGAPELLRGTATNAEVSAAAAGATGSEELPPGDRGCRNGGGRGPAATTSSTGVAVGAEHGEDSLSRKPDPEPGRMDHHQPGTGRYQVLLNEEDNSESSAIEQPPTSNPAPQIVQAASSAPALETDSSPPPYSSITVEVPTTSDTEVYGEFYPVPPPYSVATSLPTYDEAEKAKAAAMAAAAAETSQRIQEEECPPRDDFSDADQLRVGNDGIFMLAFFMAFIFNWLGFCLSFCITNTIAGRYGAICGFGLSLIKWILIVRFSDYFTGYFNGQYWLWWIFLVLGLLLFFRGFVNYLKVRNMSESMAAAHRTRYFFLL

SEQ ID NO: 149 - protein, 222 aa, Homo sapiens
MDHHQPGTGRYQVLLNEEDNSESSAIEQPPTSNPAPQIVQAASSAPALETDSSPPPYSSITVEVPTTSDTEVYGEFYPVPPPYSVATSLPTYDEAEKAKAAAMAAAAAETSQRIQEEECPPRDDFSDADQLRVGNDGIFMLAFFTGRYGAICGFGLSLIKWILIVRFSDYFTGYFNGQYWLWWIFLVLGLLLFFRGFVNYLKVRNMSESMAAAHRTRYFFLL

SEQ ID NO: 150 - protein, 336 aa, Homo sapiens; identical to SEQ ID NO: 148

SEQ ID NO: 151 - protein, 242 aa, Homo sapiens
MDHHQPGTGRYQVLLNEEDNSESSAIEQPPTSNPAPQIVQAASSAPALETDSSPPPYSSITVEVPTTSDTEVYGEFYPVPPPYSVATSLPTYDEAEKAKAAAMAAAAAETSQRIQEEECPPRDDFSDADQLRVGNDGIFMLAFFMAFIFNWLGFCLSFCITNTIAGRYGAICGFGLSLIKWILIVRFSDYFTGYFNGQYWLWWIFLVLGLLLFFRGFVNYLKVRNMSESMAAAHRTRYFFLL

SEQ ID NO: 152 - protein, 325 aa, Homo sapiens
MDMWTALLILQALLLPSLADGATPALRFVAVGDWGGVPNAPFHTAREMANAKEIARTVQILGADFILSLGDNFYFTGVQDINDKRFQETFEDVFSDRSLRKVPWYVLAGNHDHLGNVSAQIAYSKISKRWNFPSPFYRLHFKIPQTNVSVAIFMLDTVTLCGNSDDFLSQQPERPRDVKLARTQLSWLKKQLAAAREDYVLVAGHYPVWSIAEHGPTHCLVKQLRPLLATYGVTAYLCGHDHNLQYLQDENGVGYVLSGAGNFMDPSKRHQRKVPNGYLRFHYGTEDSLGGFAYVEISSKEMTVTYIEASGKSLFKTRLPRRARP

SEQ ID NO: 153 - protein, 325 aa, Homo sapiens; identical to SEQ ID NO: 152

SEQ ID NO: 154 - protein, 325 aa, Homo sapiens; identical to SEQ ID NO: 152

SEQ ID NO: 155 - protein, 74 aa, Homo sapiens
MDMWTALLILQALLLPSLADGATPALRFVAVGDWGGVPNAPFHTAREMANAKEIARTVQILGADFILSLGDNFY

SEQ ID NO: 156 - protein, 59 aa, Homo sapiens
MDMWTALLILQALLLPSLGISWTPQSGTSARSPTAICASTMGLKTHWVALPMWRSAPKR

SEQ ID NO: 157 - protein, 124 aa, Homo sapiens
MDMWTALLILQALLLPSLADGATPALRFVAVGDWGGVPNAPFHTAREMANAKEIARTVQILGADFILSLGDNFYFTGVQDINDKRFQETFEDVFSDRSLRKVPWYVLAGNHDHLGNVSAQIAYS

SEQ ID NO: 158 - protein, 52 aa, Homo sapiens
MDMWTALLILQALLLPSLADGATPALRFVAVGDWGGVPNAPFHTAREMANAK

SEQ ID NO: 159 - protein, 325 aa, Homo sapiens; identical to SEQ ID NO: 152

SEQ ID NO: 160 - protein, 119 aa, Homo sapiens
MPSDFISLLSADLDLESPKSLYSRDSLKLHPSQNFHRAGLLEESVYDLLPKELQLPPSRETSVASMSQTSGGEAGSPPPAVVAAGIPEMFILCILMCMILRFKKGFASEAGSVCIKNDL

SEQ ID NO: 161 - protein, 150 aa, Homo sapiens
MSGSMATAEASGSDGKGQEVETSVTYYRLEEVAKRNSLKELWLVIHGRVYDVTRFLNEHPGGEEVLLEQAGVDASESFEDVGHSSDAREMLKQYYIGDIHPSDLKPESGSKDPSKNDTCKSCWAYWILPIIGAVLLGFLYRYYTSESKSS

SEQ ID NO: 162 - protein, 146 aa, Homo sapiens
MATAEASGSDGKGQEVETSVTYYRLEEVAKRNSLKELWLVIHGRVYDVTRFLNEHPGGEEVLLEQAGVDASESFEDVGHSSDAREMLKQYYIGDIHPSDLKPESGSKDPSKNDTCKSCWAYWILPIIGAVLLGFLYRYYTSESKSS

SEQ ID NO: 163 - protein, 64 aa, Homo sapiens
KRNSLKELWLVIHGRVYDVTRFLNEDPSKNDTCKSCWAYWILPIIGAVLLGFLYRYYTSESKSS

SEQ ID NO: 164 - protein, 317 aa, Homo sapiens
MTSRTRVTWPSPPRPLPVPAAAAVAFGAKGTDPAEARSSRGIEEAGPRAHGRAGREPERRRSRQQRRGGLQARRSTLLKTCARARATAPGAMKMVAPWTRFYSNSCCLCCHVRTGTILLGVWYLIINAVVLLILLSALADPDQYNFSSSELGGDFEFMDDANMCIAIAISLLMILICAMATYGAYKQRAAWIIPFFCYQIFDFALNMLVAITVLIYPNSIQEYIRQLPPNFPYRDDVMSVNPTCLVLIILLFISIILTFKGYLISCVWNCYRYINGRNSSDVLVYVTSNDTTVLLPPYDDATVNGAAKEPPPPYVSA

SEQ ID NO: 165 - protein, 152 aa, Homo sapiens
MKMVAPWTRFYSNSCCLCCHVRTGTILLGVWYLIINAVVLLILLSALADPDQYNFSSSELGGDFEFMDDAKILFNLSADMCIAIAISLLMILICAMATYGAYKQRAAWIIPFFCYQIFDFALNMLVAITVLIYPNSIQEYIRQLPPNFPYRD

SEQ ID NO: 166 - protein, 226 aa, Homo sapiens
MKMVAPWTRFYSNSCCLCCHVRTGTILLGVWYLIINAVVLLILLSALADPDQYNFSSSELGGDFEFMDDANMCIAIAISLLMILICAMATYGAYKQRAAWIIPFFCYQIFDFALNMLVAITVLIYPNSIQEYIRQLPPNFPYRDDVMSVNPTCLVLIILLFISIILTFKGYLISCVWNCYRYINGRNSSDVLVYVTSNDTTVLLPPYDDATVNGAAKEPPPPYVSA

SEQ ID NO: 167 - protein, 317 aa, Homo sapiens; identical to SEQ ID NO: 164

SEQ ID NO: 168 - protein, 177 aa, Homo sapiens
MFHVSFRYIFGLPPLILVLLPVASSDCDIEGKDGKQYESVLMVSIDQLLDSMKEIGSNCLNNEFNFFKRHICDANKEGMFLFRAARKLRQFLKMNSTGDFDLHLLKVSEGTTILLNCTGQVKGRKPAALGEAQPTKSLEENKSLKEQKKLNDLCFLKRLLQEIKTCWNKILMGTKEH

SEQ ID NO: 169 - protein, 115 aa, Homo sapiens
MFHVSFRYIFGLPPLILVLLPVASSDCDIEGKDGKQYESVLMVSIDQLLDSMKEIGSNCLNNEFNFFKRHICDANKEENKSLKEQKKLNDLCFLKRLLQEIKTCWNKILMGTKEH

SEQ ID NO: 170 - protein, 71 aa, Homo sapiens
MFHVSFRYIFGLPPLILVLLPVASSDCDIEGKDGKQYESVLMVSIDQLLNQPYKKKEKRTERKQQSAMSNN

SEQ ID NO: 171 - protein, 37 aa, Homo sapiens
MFHVSFRYIFGLPPLILVLLPVASSDCDIEGQHERNW

SEQ ID NO: 172 - protein, 133 aa, Homo sapiens
MFHVSFRYIFGLPPLILVLLPVASSDCDIEGKDGKQYESVLMVSIDQLLDSMKEIGSNCLNNEFNFFKRHICDANKVKGRKPAALGEAQPTKSLEENKSLKEQKKLNDLCFLKRLLQEIKTCWNKILMGTKEH

SEQ ID NO: 173 - protein, 37 aa, Homo sapiens; identical to SEQ ID NO: 171

SEQ ID NO: 174 - protein, 159 aa, Homo sapiens
MFHVSFRYIFGLPPLILVLLPVASSDCDIEGKDGKQYESVLMVSIDQLLDSMKEIGSNCLNNEFNFFKRHICDANKEGMFLFRAARKLRQFLKMNSTGDFDLHLLKVSEGTTILLNCTGQEENKSLKEQKKLNDLCFLKRLLQEIKTCWNKILMGTKEH

SEQ ID NO: 175 - protein, 229 aa, Homo sapiens
MTPQLLLALVLWASCPPCSGRKGPPAALTLPRVQCRASRYPIAVDCSWTLPPAPNSTSPVSFIATYRLGMAARGHSWPCLQQTPTSTSCTITDVQLFSMAPYVLNVTAVHPWGSSSSFVPFITEHIIKPDPPEGVRLSPLAERQLQVQWEPPGSWPFPEIFSLKYWIRYKRQGAARFHRVGPIEATSFILRAVRPRARYYVQVAAQDLTDYGELSDWSLPATATMSLGK

SEQ ID NO: 176 - protein, 130 aa, Homo sapiens
  misc_feature (1)..(1): Xaa can be any naturally occurring amino acid
XMLENWTRTSLEKQEQPHEDPERKGSLSNLMDFVKKTGICASKWEWGTTHNFLYKHGGIRDKIMSSRKHLHLVDAGLAINTPFPLVLPPTREVHLILSFDFSAGDPFEHPRSATSNELLCMSVSSAVKLG

SEQ ID NO: 177 - protein, 36 aa, Homo sapiens
MRTRPRPRLRLECNGMISAHWHLHLLSSSDSPPSAS

SEQ ID NO: 178 - protein, 47 aa, Homo sapiens
MKEQGLLDAVTYLAGVSGSTWAISSLYTNDGDMEALEADLKHRFTRQ

SEQ ID NO: 179 - protein, 43 aa, Homo sapiens
MRTRPRPRLRVSLLLPRLECNGMISAHWHLHLLSSSDSPPSAS

SEQ ID NO: 180 - protein, 194 aa, Homo sapiens [sequence omitted]

SEQ ID NO: 181 - protein, 312 aa, Homo sapiens
MLRAPGCLLRTSVAPAAALAAALLSSLARCSLLEPRDPVASSLSPYFGTKTRYEDVNPVLLSGPEAPWRDPELLEGTCTPVQLVALIRHGTRYPTVKQIRKLRQLHGLLQARGSRDGGASSTGSRDLGAALADWPLWYADWMDGQLVEKGRQDMRQLALRLASLFPALFSRENYGRLRLITSSKHRCMDSSAAFLQGLWQHYHPGLPPPDVADMEFGPPTVNDKLMRFFDHCEKFLTEVEKNATALYHVEAFKTGPEMQNILKKVAATLQVPVNDLNAGLSQFLLQSSSSLVMQRLFFHCFLSWATSKTRNP

SEQ ID NO: 182 - protein, 487 aa, Homo sapiens
MLRAPGCLLRTSVAPAAALAAALLSSLARCSLLEPRDPVASSLSPYFGTKTRYEDVNPVLLSGPEAPWRDPELLEGTCTPVQLVALIRHGTRYPTVKQIRKLRQLHGLLQARGSRDGGASSTGSRDLGAALADWPLWYADWMDGQLVEKGRQDMRQLALRLASLFPALFSRENYGRLRLITSSKHRCMDSSAAFLQGLWQHYHPGLPPPDVADMEFGPPTVNDKLMRFFDHCEKFLTEVEKNATALYHVEAFKTGPEMQNILKKVAATLQVPVNDLNADLIQVAFFTCSFDLAIKGVKSPWCDVFDIDDAKVLEYLNDLKQYWKRGYGYTINSRSSCTLFQDIFQHLDKAVEQKQRSQPISSPVILQFGHAETLLPLLSLMGYFKDKEPLTAYNYKKQMHRKFRSGLIVPYASNLIFVLYHCENAKTPKEQFRVQMLLNEKVLPLAYSQETVSFYEDLKNHYKDILQSCQTSEECELARANSTSDEL

SEQ ID NO: 183 - protein, 286 aa, Homo sapiens
MCLFQLCGLVRYMEFGPPTVNDKLMRFFDHCEKFLTEVEKNATALYHVEAFKTGPEMQNILKKVAATLQVPVNDLNADLIQVAFFTCSFDLAIKGVKSPWCDVFDIDDAKVLEYLNDLKQYWKRGYGYTINSRSSCTLFQDIFQHLDKAVEQKQRSQPISSPVILQFGHAETLLPLLSLMGYFKDKEPLTAYNYKKQMHRKFRSGLIVPYASNLIFVLYHCENAKTPKEQFRVQMLLNEKVLPLAYSQETVSFYEDLKNHYKDILQSCQTSEECELARANSTSDEL

SEQ ID NO: 184 - protein, 207 aa, Homo sapiens
MASFPPRVNEKEIVFLFFLLVRLRTIGELLAPAAPFDKKCGRENWTVAFAPDGSYFAWSQGHRTVKLVPWSQCLQNFLLHGTKNVTNSSSLRLPRQNSDGGQKNKPREHIIDCGDIVWSLAFGSSVPEKQSRCVNIEWHRFRFGQDQLLLATGLNNGRIKIWDVYTGKLLLNLVDHTEVVRDLTFAPDGSLILVSASRDKTLRVWDL

SEQ ID NO: 185 - protein, 74 aa, Homo sapiens
MASFPPRVNEKEIVRLRTIGELLAPAAPFDKKCGRENWTVAFAPDGSYFAWSQGHRTVKLVPWSQCLQNLKTPP

SEQ ID NO: 186 - protein, 54 aa, Homo sapiens
MASFPPRVNEKEIGNMMKVLRGHQNWVYSCAFSPDSSMLCSVGASKAVVAAILV

SEQ ID NO: 187 - protein, 78 aa, Homo sapiens
MASFPPRVNEKEIAPAAPFDKKCGRENWTVAFAPDGSYFAWSQGHRTVKLVPWSQCLQNFLLHGTKNVTNSSSLRLPR

SEQ ID NO: 188 - protein, 276 aa, Homo sapiens
MAGPAALSAAAAAALAAALLLLRREDPGPGAGPSMAETEALSKLREDFRMQNKSVFILGASGETGRVLLKEILEQGLFSKVTLIGRRKLTFDEEAYKNVNQEVVDFEKLDDYASAFQGHDVGFCCLGTTRGKAGAEGFVRVDRDYVLKSAELAKAGGCKHFNLLSSKGADKSSNFLYLQVKGEVEAKVEELKFDRYSVFRPGVLLCDRQESRPGEWLVRKFFGSLPDSWASGHSVPVVTVVRAMLNNVVRPRDKQMELLENKAIHDLGKAHGSLKP

SEQ ID NO: 189 - protein, 133 aa, Homo sapiens
MAETEALSKLREDFRMQNKSVFILGASGETGRVLLKEILEQGLFSKVTLIGRRKLTFDEEAYKNVNQEVVDFEKLDDYASAFQGHDVGFCCLGTTRGKAGAVRKAYALFPFCWPVISRILFLLTLFLCACCNA

SEQ ID NO: 190 - protein, 133 aa, Homo sapiens; identical to SEQ ID NO: 189

SEQ ID NO: 191 - protein, 133 aa, Homo sapiens; identical to SEQ ID NO: 189

SEQ ID NO: 192 - protein, 463 aa, Homo sapiens
MGAGPSLLLAALLLLLSGDGAVRCDTPANCTYLDLLGTWVFQVGSSGSQRDVNCSVMGPQEKKVVVYLQKLDTAYDDLGNSGHFTIIYNQGFEIVLNDYKWFAFFKYKEEGSKVTTYCNETMTGWVHDVLGRNWACFTGKKVGTASENVYVNIAHLKNSQEKYSNRLYKYDHNFVKAINAIQKSWTATTYMEYETLTLGDMIRRSGGHSRKIPRPKPAPLTAEIQQKILHLPTSWDWRNVHGINFVSPVRNQASCGSCYSFASMGMLEARIRILTNNSQTPILSPQEVVSCSQYAQGCEGGFPYLIAGKYAQDFGLVEEACFPYTGTDSPCKMKEDCFRYYSSEYHYVGGFYGGCNEALMKLELVHHGPMAVAFEVYDDFLHYKKGIYHHTGLRDPFNPFELTNHAVLLVGYGTDSASGMDYWIVKNSWGTGWGENGYFRIRRGTDECAIESIAVAATPIPKL

SEQ ID NO: 193 - protein, 137 aa, Homo sapiens
MGAGPSLLLAALLLLLSGDGAVRCDTPANCTYLDLLGTWVFQVGSSGSQRDVNCSVMGPQEKKVVVYLQKLDTAYDDLGNSGHFTIIYNQGFEIVLNDYKWFAFFKDVTDFISHLFMQLGTVGIYDLPHLRNKLVIK

SEQ ID NO: 194 - protein, 245 aa, Homo sapiens
  misc_feature (1)..(1): Xaa can be any naturally occurring amino acid
XVVDSPLARSARLPGPQEKKVVVYLQKLDTAYDDLGNSGHFTIIYNQGFEIVLNDYKWFAFFKYKEEGSKVTTYCNETMTGWVHDVLGRNWACFTGKKVGTASENVYVNIAHLKNSQEKYSNRLYKYDHNFVKAINAIQKSWTATTYMEYETLTLGDMIRRSGGHSRKIPRPKPAPLTAEIQQKILHLPTSWDWRNVHGINFVSPVRNQASCGSCYSFASMGMLEARIRILTNNSQTPILSPQEV

SEQ ID NO: 195 - protein, 36 aa, Homo sapiens
  misc_feature (1)..(1): Xaa can be any naturally occurring amino acid
XDVTDFISHLFMQLGTVGIYDLPHLRNKLAMNRRWG

SEQ ID NO: 196 - protein, 141 aa, Homo sapiens
MGAGPSLLLAALLLLLSGDGAVRCDTPANCTYLDLLGTWVFQVGSSGSQRDVNCSVMGPQEKKVVVYLQKLDTAYDDLGNSGHFTIIYNQGFEIVLNDYKWFAFFKDVTDFISHLFMQLGTVGIYDLPHLRNKLAMNRRWG

SEQ ID NO: 197 - protein, 431 aa, Homo sapiens
MSSVCDMSFLQKSCITMVHFCGLLTLHREPVPLKSISVSVNIYEFVAGVSATLNYENEEKVPLEAFFVFPMDEDSAVYSFEALVDGKKIVAELQDKMKARTNYEKAISQGHQAFLLEGDSSSRDVFSCNVGNLQPGSKAAVTLKYVQELPLEADGALRFVLPAVLNPRYQFSGSSKDSCLNVKTPIVPVEDLPYTLSMVATIDSQHGIEKVQSNCPLSPTEYLGEDKTSAQVSLAAGHKFDRDVELLIYYNEVHTPSVVLEMGMPNMKPGHLMGDPSAMVSFYPNIPEDQPSNTCGEFIFLMDRSGSMQSPMSSQDTSQLRIQAAKETLILLLKSLPIGCYFNIYGFGSSYEACFPESVKYTQQTMEEALGRVKLMQADLGGTEILAPLQNIYRGPSIPGHPLQLFVFTDGEVTDTFSVIKEVRINRQKHR

SEQ ID NO: 198 - protein, 786 aa, Homo sapiens
MVHFCGLLTLHREPVPLKSISVSVNIYEFVAGVSATLNYENEEKVPLEAFFVFPMDEDSAVYSFEALVDGKKIVAELQDKMKARTNYEKAISQGHQAFLLEGDSSSRDVFSCNVGNLQPGSKAAVTLKYVQELPLEADGALRFVLPAVLNPRYQFSGSSKDSCLNVKTPIVPVEDLPYTLSMVATIDSQHGIEKVQSNCPLSPTEYLGEDKTSAQVSLAAGHKFDRDVELLIYYNEVHTPSVVLEMGMPNMKPGHLMGDPSAMVSFYPNIPEDQPSNTCGEFIFLMDRSGSMQSPMSSQDTSQLRIQAAKETLILLLKSLPIGCYFNIYGFGSSYEACFPESVKYTQQTMEEALGRVKLMQADLGGTEILAPLQNIYRGPSIPGHPLQLFVFTDGEVTDTFSVIKEVRINRQKHRCFSFGIGEGTSTSLIKGIARASGGTSEFITGKDRMQSKALRTLKRSLQPVVEDVSLSWHLPPGLSAKMLSPEQTVIFRGQRLISYAQLTGRMPAAETTGEVCLKYTLQGKTFEDKVTFPLQPKPDVNLTIHRLAAKSLLQTKDMGLRETPASDKKDALNLSLESGVISSFTAFIAINKELNKPVQGPLAHRDVPRPILLGASAPLKIKCQSGFRKALHSDRPPSASQPRGELMCYKAKTFQMDDYSLCGLISHKDQHSPGFGENHLVQLIYHQNANGSWDLNEDLAKILGMSLEEIMAAQPAELVDSSGWATILAVIWLHSNGKDLKCEWELLERKAVAWMRAHAGSTMPSVVKAAITFLKSSVDPAIFAF

SEQ ID NO: 199 - protein, 786 aa, Homo sapiens; identical to SEQ ID NO: 198

SEQ ID NO: 200 - protein, 327 aa, Homo sapiens
MLSLCICGTAITSQYLAERYKVNTPMLQSFINYCLLFLIYTVMLAFRSGSDNLLVILKRKWWKYILLGLADVEANYVIVRAYQYTTLTSVQLLDCFGIPVLMALSWFILHARYRVIHFIAVAVCLLGVGTMVGADILAGREDNSGSDVLIGDILVLLGASLYAISNVCEEYIVKKLSRQEFLGMVGLFGTIISGIQLLIVEYKDIASIHWDWKIALLFVAFALCMFCLYSFMPLVIKVTSATSVNLGILTADLYSLFVGLFLFGYKFSGLYILSFTVIMVGFILYCSTPTRTAEPAESSVPPVTSIGIDNLGLKLEENLQETHSAVL

SEQ ID NO: 201 - protein, 357 aa, Homo sapiens
MEADSPAGPGAPEPLAEGAAAEFSSLLRRIKGKLFTWNILKTIALGQMLSLCICGTAITSQYLAERYKVNTPMLQSFINYCLLFLIYTVMLAFRSGSDNLLVILKRKWWKYILLGLADVEANYVIVRAYQYTTLTSVQLLDCFGIPVLMALSWFILHARYRVIHFIAVAVCLLGVGTMVGADILAGREDNSGSDVLIGDILVLLGASLYAISNVCEEYIVKKLSRQEFLGMVGLFGTIISGIQLLIVEYKDIASIHWDWKIALLFVAFALCMFCLYSFMPLVIKVTSATSVNLGILTADLYSLFVGLFLFGYKDSTSCPSLSSWWGLSCTAPPLLARPSRLKAACLQSPALGLTTWG

SEQ ID NO: 202 - protein, 374 aa, Homo sapiens
MEADSPAGPGAPEPLAEGAAAEFSSLLRRIKGKLFTWNILKTIALGQMLSLCICGTAITSQYLAERYKVNTPMLQSFINYCLLFLIYTVMLAFRSGSDNLLVILKRKWWKYILLGLADVEANYVIVRAYQYTTLTSVQLLDCFGIPVLMALSWFILHARYRVIHFIAVAVCLLGVGTMVGADILAGREDNSGSDVLIGDILVLLGASLYAISNVCEEYIVKKLSRQEFLGMVGLFGTIISGIQLLIVEYKDIASIHWDWKIALLFVAFALCMFCLYSFMPLVIKVTSATSVNLGILTADLYSLFVGLFLFGYKFSGLYILSFTVIMVGFILYCSTPTRTAEPAESSVPPVTSIGIDNLGLKLEENLQETHSAVL

SEQ ID NO: 203 - protein, 265 aa, Homo sapiens
MEADSPAGPGAPEPLAEGAAAEFSSLLRRIKGKLFTWNILKTIALGQMLSLCICGTAITSQYLAERYKVNTPMLQSFINYCLLFLIYTVMLAFRSGSDNLLVILKRKWWKYILLGLADVEANYVIVRAYQYTTLTSVQLLDCFGIPVLMALSWFILHARYRVIHFIAVAVCLLGVGTMVGADILAGREDNSGSDVLIGDILVLLGASLYAISNVCEEYIVKKLSRQEFLGMVGLFGTIISGIQLPAVRGICPVYVLPVQLHAIGD

SEQ ID NO: 204 - protein, 49 aa, Homo sapiens
MEAMAASTSLPDPGDFDRNVPRICGVCGDRATGFHFNAMTCEGCKGFFR

SEQ ID NO: 205 - protein, 1093 aa, Homo sapiens
MSQPGIPASGGAPASLQAQNGAALASGSPYTNGPVQNALLSSQESVSQGYNFQLPGSYPHPIPAKTLNPVSGQSNYGGSQGSGQTLNRPPVASNPVTPSLHSGPAPRMPLPASQNPATTPMPSSSFLPEANLPPPLNWQYNYPSTASQTNHCPRASSQPTVSGNTSLTTNHQYVSSGYPSLQNSFIKSGPSVPPLVNPPLPTTFQPGAPHGPPPAGGPPPVRALTPLTSSYRDVPQPLFNSAVNQEGITSNTNNGSMVVHSSYDEIEGGGLLATPQLTNKNPKMSRSVGYSYPSLPPGYQNTTPPGATGVPPSSLNYPSGPQAFTQTPLGANHLTTSMSGLSLQPEGLRVVNLLQERNMLPSTPLKPPVPNLHEDIQKLNCNPELFRCTLTSIPQTQALLNKAKLPLGLLLHPFKDLVQLPVVTSSTIVRCRSCRTYINPFVSFLDQRRWKCNLCYRVNDVPEEFLYNPLTRVYGEPHRRPEVQNATIEFMAPSEYMLRPPQPPVYLFVFDVSHNAVETGYLNSVCQSLLDNLDLLPGNTRTKIGFITFDSTIHFYGLQESLSQPQMLIVSDIEDVFIPMPENLLVNLNESKELVQDLLKTLPQMFTKTLETQSALGPALQAAFKLMSPTGGRMSVFQTQLPTLGVGALKPREEPNHRSSAKDIHMTPSTDFYKKLALDCSGQQVAVDLFLLSGQYSDLASLGCISRYSAGSVYYYPSYHHQHNPVQVQKLQKELQRYLTRKIGFEAVMRIRCTKGLSIHTFHGNFFVRSTDLLSLPNVNPDAGYAVQMSVEESLTDTQLVSFQSALLYTSSKGERRIRVHTLCLPVVSTLNDVFLGADVQAISGLLANMAVDRSMTASLSDARDALVNAVIDSLSAYRSSVLSNQQPGLMVPFSLRLFPLFVLALLKQKSFQTGTNARLDERIFAMCQVKNQPLVYLMLTTHPSLYRVDNLSDEGALNISDRTIPQPPILQLSVEKLSRDGAFLMDAGSVLMLWVGKNCTQNFLSQVLGVQNYASIPQPMTDLPELDTPESARIIAFISWLREQRPFFPILYVIRDESPMKANFLQNMIEDRTESALSYYEFLLHIQQQVNK

SEQ ID NO: 206 - protein, 398 aa, Homo sapiens
MLRLYVLVMGVSAFTLQPAAHTGAARSCRFRGRHYKREFRLEGEPVALRCPQVPYWLWASVSPRINLTWHKNDSARTVPGEEETRMWAQDGALWLLPALQEDSGTYVCTTRNASYCDKMSIELRVFENTDAFLPFISYPQILTLSTSGVLVCPDLSEFTRDKTDVKIQWYKDSLLLDKDNEKFLSVRGTTHLLVHDVALEDAGYYRCVLTFAHEGQQYNITRSIELRIKKKKEETIPVIISPLKTISASLGSRLTIPCKVFLGTGTPLTTMLWWTANDTHIESAYPGGRVTEGPRQEYSENNENYIEVPLIFDPVTREDLHMDFKCVVHNTLSFQTLRTTVKEASSTFSWGIVLAPLSLAFLVLGGIWMHRRCKHRTGKADGLTVLWPHHQDFQSYPK

SEQ ID NO: 207 - protein, 398 aa, Homo sapiens; identical to SEQ ID NO: 206

SEQ ID NO: 208 - protein, 296 aa, Homo sapiens
MLRLYVLVMGVSAFTLQPAAHTGAARSCRFRGRHYKREFRLEGEPVALRCPQVPYWLWASVSPRINLTWHKNDSARTVPGEEETRMWAQDGALWLLPALQEDSGTYVCTTRNASYCDKMSIELRVFENTDAFLPFISYPQILTLSTSGVLVCPDLSEFTRDKTDVKIQWYKDSLLLDKDNEKFLSVRGTTHLLVHDVALEDAGYYRCVLTFAHEGQQYNITRSIELRIKKKKEETIPVIISPLKTISASLGSRLTIPCKVFLGTGTPLTTMLWWTANDTHIESAYPGGRVTEGPRQ

SEQ ID NO: 209 - protein, 229 aa, Homo sapiens
MLRLYVLVMGVSAFTLQPAAHTGAARSCRFRGRHYKREFRLEGEPVALRCPQVPYWLWASVSPRINLTWHKNDSARTVPGEEETRMWAQDGALWLLPALQEDSGTYVCTTRNASYCDKMSIELRVFENTDAFLPFISYPQILTLSTSGVLVCPDLSEFTRDKTDVKIQWYKDSLLLDKDNEKFLSVRGTTHLLVHDVALEDAGYYRCVLTFAHEGQQYNITRSIELRIK

SEQ ID NO: 210 - protein, 447 aa, Homo sapiens
MKVLLRLICFIALLISSLEADKCKEREEKIILVSSANEIDVRPCPLNPNEHKGTITWYKDDSKTPVSTEQASRIHQHKEKLWFVPAKVEDSGHYYCVVRNSSYCLRIKISAKFVENEPNLCYNAQAIFKQKLPVAGDGGLVCPYMEFFKNENNELPKLQWYKDCKPLLLDNIHFSGVKDRLIVMNVAEKHRGNYTCHASYTYLGKQYPITRVIEFITLEENKPTRPVIVSPANETMEVDLGSQIQLICNVTGQLSDIAYWKWNGSVIDEDDPVLGEDYYSVENPANKRRSTLITVLNISEIESRFYKHPFTCFAKNTHGIDAAYIQLIYPVTNFQKHMIGICVTLTVIIVCSVFIYKIFKIDIVLWYRDSCYDFLPIKASDGKTYDAYILYPKTVGEGSTSDCDIFVFKVLPEVLEKQCGYKLFIYGRDDYVGEGMCVMEQSKGLLL

SEQ ID NO: 211 - protein, 447 aa, Homo sapiens; identical to SEQ ID NO: 210

SEQ ID NO: 212 - protein, 173 aa, Homo sapiens
MKVLLRLICFIALLISSLEADKCKEREEKIILVSSANEIDVRPCPLNPNEHKGTITWYKDDSKTPVSTEQASRIHQHKEKLWFVPAKVEDSGHYYCVVRNSSYCLRIKISAKFVENEPNLCYNAQAIFKQKLPVAGDGGLVCPYMEFFKNENNELPKLQWYKVAVSRVWATAL

SEQ ID NO: 213 - protein, 538 aa, Homo sapiens
MKVLLRLICFIALLISSLEADKCKEREEKIILVSSANEIDVRPCPLNPNEHKGTITWYKDDSKTPVSTEQASRIHQHKEKLWFVPAKVEDSGHYYCVVRNSSYCLRIKISAKFVENEPNLCYNAQAIFKQKLPVAGDGGLVCPYMEFFKNENNELPKLQWYKDCKPLLLDNIHFSGVKDRLIVMNVAEKHRGNYTCHASYTYLGKQYPITRVIEFITLEENKPTRPVIVSPANETMEVDLGSQIQLICNVTGQLSDIAYWKWNGSVIDEDDPVLGEDYYSVENPANKRRSTLITVLNISEIESRFYKHPFTCFAKNTHGIDAAYIQLIYPVTNFQKHMIGICVTLTVIIVCSVFIYKIFKIDIVLWYRDSCYDFLPIKVLPEVLEKQCGYKLFIYGRDDYVGEDIVEVINENVKKSRRLIIILVRETSGFSWLGGSSEEQIAMYNALVQDGIKVVLLELEKIQDYEKMPESIKFIKQKHGAIRWSGDFTQGPQSAKTRFWKNVRYHMPVQRRSPSSKHQLLSPATKEKLQREAHVPLG

SEQ ID NO: 214 - protein, 569 aa, Homo sapiens
MKVLLRLICFIALLISSLEADKCKEREEKIILVSSANEIDVRPCPLNPNEHKGTITWYKDDSKTPVSTEQASRIHQHKEKLWFVPAKVEDSGHYYCVVRNSSYCLRIKISAKFVENEPNLCYNAQAIFKQKLPVAGDGGLVCPYMEFFKNENNELPKLQWYKDCKPLLLDNIHFSGVKDRLIVMNVAEKHRGNYTCHASYTYLGKQYPITRVIEFITLEENKPTRPVIVSPANETMEVDLGSQIQLICNVTGQLSDIAYWKWNGSVIDEDDPVLGEDYYSVENPANKRRSTLITVLNISEIESRFYKHPFTCFAKNTHGIDAAYIQLIYPVTNFQKHMIGICVTLTVIIVCSVFIYKIFKIDIVLWYRDSCYDFLPIKASDGKTYDAYILYPKTVGEGSTSDCDIFVFKVLPEVLEKQCGYKLFIYGRDDYVGEDIVEVINENVKKSRRLIIILVRETSGFSWLGGSSEEQIAMYNALVQDGIKVVLLELEKIQDYEKMPESIKFIKQKHGAIRWSGDFTQGPQSAKTRFWKNVRYHMPVQRRSPSSKHQLLSPATKEKLQREAHVPLG

SEQ ID NO: 215 - protein, 119 aa, Homo sapiens
MKVLLRLICFIALLISSLEADKCKEREEKIILVSSANEIDVRPCPLNPNEHKGTITWYKDDSKTPVSTEQASRIHQHKEKLWFVPAKVEDSGHYYCVVRIANLYFLTIYTLVESKIGSS

SEQ ID NO: 216 - protein, 124 aa, Homo sapiens
  misc_feature (1)..(1): Xaa can be any naturally occurring amino acid
XKCKEREEKIILVSSANEIDVRPCPLNPNEHKGTITWYKDDSKTPVSTEQASRIHQHKEKLWFVPAKVEDSGHYYCVETEDLCALIWSFLKMKIMSYLNYSGIRIANLYFLTIYTLVESKIGSS

SEQ ID NO: 217 - protein, 447 aa, Homo sapiens; identical to SEQ ID NO: 210

SEQ ID NO: 218 - protein, 298 aa, Homo sapiens
MEFFKNENNELPKLQWYKDCKPLLLDNIHFSGVKDRLIVMNVAEKHRGNYTCHASYTYLGKQYPITRVIEFITLEENKPTRPVIVSPANETMEVDLGSQIQLICNVTGQLSDIAYWKWNGSVIDEDDPVLGEDYYSVENPANKRRSTLITVLNISEIESRFYKHPFTCFAKNTHGIDAAYIQLIYPVTNFQKHMIGICVTLTVIIVCSVFIYKIFKIDIVLWYRDSCYDFLPIKASDGKTYDAYILYPKTVGEGSTSDCDIFVFKVLPEVLEKQCGYKLFIYGRDDYVGEDIVEVINE

SEQ ID NO: 219 - protein, 182 aa, Homo sapiens
MKVLLRLICFIALLISSLEADKCKEREEKIILVSSANEIDVRPCPLNPNEHKGTITWYKDDSKTPVSTEQASRIHQHKEKLWFVPAKVEDSGHYYCVVRNSSYCLRIKISAKFVENEPNLCYNAQAIFKQKLPVAGDGGLVCPYMEFFKNENNELPKLQWYKDCKPLLLDNIHFSGVKDRLI

SEQ ID NO: 220 - protein, 114 aa, Homo sapiens
MKVLLRLICFIALLISSLEADKCKEREEKIILVSSANEIDVRPCPLNPNEHKGTITWYKDDSKTPVSTEQASRIHQHKEKLWFVPAKVEDSGHYYCVVRNSSYCLRIKISAKFV

SEQ ID NO: 221 - protein, 106 aa, Homo sapiens
MKVLLRLICFIALLISSLEADKCKEREEKIILVSSANEIDVRPCPLNPNEHKGTITWYKDDSKTPVSTEQASRIHQHKEKLWFVPAKVEDSGHYYCVVRNSSYCLR

SEQ ID NO: 222 - protein, 80 aa, Homo sapiens
MKVLLRLICFIALLISSLEADKCKEREEKIILVSSANEIDVRPCPLNPNEHKGTITWYKDDSKTPVSTEQASRIHQHKEK

SEQ ID NO: 223 - protein, 575 aa, Homo sapiens
MWSLLLCGLSIALPLSVTADGCKDIFMKNEILSASQPFAFNCTFPPITSGEVSVTWYKNSSKIPVSKIIQSRIHQDETWILFLPMEWGDSGVYQCVIKGRDSCHRIHVNLTVFEKHWCDTSIGGLPNLSDEYKQILHLGKDDSLTCHLHFPKSCVLGPIKWYKDCNEIKGERFTVLETRLLVSNVSAEDRGNYACQAILTHSGKQYEVLNGITVSITERAGYGGSVPKIIYPKNHSIEVQLGTTLIVDCNVTDTKDNTNLRCWRVNNTLVDDYYDESKRIREGVETHVSFREHNLYTVNITFLEVKMEDYGLPFMCHAGVSTAYIILQLPAPDFRAYLIGGLIALVAVAVSVVYIYNIFKIDIVLWYRSAFHSTETIVDGKLYDAYVLYPKPHKESQRHAVDALVLNILPEVLERQCGYKLFIFGRDEFPGQAVANVIDENVKLCRRLIVIVVPESLGFGLLKNLSEEQIAVYSALIQDGMKVILIELEKIEDYTVMPESIQYIKQKHGAIRWHGDFTEQSQCMKTKFWKTVRYHMPPRRCRPFPPVQLLQHTPCYRTAGPELGSRRKKCTLTTG

SEQ ID NO: 224 - protein, 172 aa, Homo sapiens
MWSLLLCGLSIALPLSVTADGCKDIFMKNEILSASQPFAFNCTFPPITSGEVSVTWYKNSSKIPVSKIIQSRIHQDETWILFLPMEWGDSGVYQCVIKGRDSCHRIHVNLTVFEKHWCDTSIGGLPNLSDEYKQILHLGKDDSLTCHLHFPKSCVLGPIKWYKDCNEIKGER

SEQ ID NO: 225 - protein, 457 aa, Homo sapiens
MTGLVSLSYFPLSTRSCALQSCSPVWGCGPCCSAGCPSPFHCLSQQDCNEIKGERFTVLETRLLVSNVSAEDRGNYACQAILTHSGKQYEVLNGITVSIKRAGYGGSVPKIIYPKNHSIEVQLGTTLIVDCNVTDTKDNTNLRCWRVNNTLVDDYYDESKRIREGVETHVSFREHNLYTVNITFLEVKMEDYGLPFMCHAGVSTAYIILQLPAPDFRAYLIGGLIALVAVAVSVVYIYNIFKIDIVLWYRSAFHSTETIVDGKLYDAYVLYPKPHKESQRHAVDALVLNILPEVLERQCGYKLFIFGRDEFPGQAVANVIDENVKLCRRLIVIVVPESLGFGLLKNLSEEQIAVYSALIQDGMKVILIELEKIEDYTVMPESIQYIKQKHGAIRWHGDFTEQSQCMKTKFWKTVRYHMPPRRCRPFPPVQLLQHTPCYRTAGPELGSRRKKCTLTTG

SEQ ID NO: 226 - protein, 556 aa, Homo sapiens
MGFWILAILTILMYSTAAKFSKQSWGLENEALIVRCPRQGKPSYTVDWYYSQTNKSIPTQERNRVFASGQLLKFLPAAVADSGIYTCIVRSPTFNRTGYANVTIYKKQSDCNVPDYLMYSTVSGSEKNSKIYCPTIDLYNWTAPLEWFKNCQALQGSRYRAHKSFLVIDNVMTEDAGDYTCKFIHNENGANYSVTATRSFTVKDEQGFSLFPVIGAPAQNEIKEVEIGKNANLTCSACFGKGTQFLAAVLWQLNGTKITDFGEPRIQQEEGQNQSFSNGLACLDMVLRIADVKEEDLLLQYDCLALNLHGLRRHTVRLSRKNPIDHHSIYCIIAVCSVFLMLINVLVIILKMFWIEATLLWRDIAKPYKTRNDGKLYDAYVVYPRNYKSSTDGASRVEHFVHQILPDVLENKCGYTLCIYGRDMLPGEDVVTAVETNIRKSRRHIFILTPQITHNKEFAYEQEVALHCALIQNDAKVILIEMEALSELDMLQAEALQDSLQHLMKVQGTIKWREDHIANKRSLNSKFWKHVRYQMPVPSKIPRKASSLTPLAAQKQ

SEQ ID NO: 227 - protein, 328 aa, Homo sapiens
MGFWILAILTILMYSTAAKFSKQSWGLENEALIVRCPRQGKPSYTVDWYYSQTNKSIPTQERNRVFASGQLLKFLPAAVADSGIYTCIVRSPTFNRTGYANVTIYKKQSDCNVPDYLMYSTVSGSEKNSKIYCPTIDLYNWTAPLEWFKNCQALQGSRYRAHKSFLVIDNVMTEDAGDYTCKFIHNENGANYSVTATRSFTVKDEQGFSLFPVIGAPAQNEIKEVEIGKNANLTCSACFGKGTQFLAAVLWQLNGTKITDFGEPRIQQEEGQNQSFSNGLACLDMVLRIADVKEEDLLLQYDCLALNLHGLRRHTVRLSRKNPSKECF

SEQ ID NO: 228 - protein, 211 aa, Homo sapiens
MYSTVSGSEKNSKIYCPTIDLYNWTAPLEWFKNCQALQGSRYRAHKSFLVIDNVMTEDAGDYTCKFIHNENGANYSVTATRSFTVKDEQGFSLFPVIGAPAQNEIKEVEIGKNANLTCSACFGKGTQFLAAVLWQLNGTKITDFGEPRIQQEEGQNQSFSNGLACLDMVLRIADVKEEDLLLQYDCLALNLHGLRRHTVRLSRKNPSKECF

SEQ ID NO: 229 - protein, 314 aa, Homo sapiens
MGFWILAILTILMYSTAAKFSKQSWGLENEALIVRCPRQGKPSYTVDWYYSQTNKSIPTQERNRVFASGQLLKFLPAAVADSGIYTCIVRSPTFNRTGYANVTIYKKQSDCNVPDYLMYSTVSGSEKNSKIYCPTIDLYNWTAPLEWFKNCQALQGSRYRAHKSFLVIDNVMTEDAGDYTCKFIHNENGANYSVTATRSFTVKDEQGFSLFPVIGAPAQNEIKEVEIGTQFLAAVLWQLNGTKITDFGEPRIQQEEGQNQSFSNGLACLDMVLRIADVKEEDLLLQYDCLALNLHGLRRHTVRLSRKNPSKECF

SEQ ID NO: 230 - protein, 259 aa, Homo sapiens
MGFWILAILTILMYSTAAKFSKQSWGLENEALIVRCPRQGKPSYTVDWYYSQTNKSIPTQERNRVFASGQLLKFLPAAVADSGIYTCIVRSPTFNRTGYANVTIYKKQSDCNVPDYLMYSTVSGSEKNSKIYCPTIDLYNWTAPLEWFKNCQALQGSRYRAHKSFLVIDNVMTEDAGDYTCKFIHNENGANYSVTATRSFTVKVWCQSFCKLKKSLIFSNTHWIQSLMRGFVMVYYGVHKCCRVVFNLCLQYFQHHQWP

SEQ ID NO: 231 - protein, 38 aa, Homo sapiens
MGFWILAILTILMYSTAAKFSKQSWGLENEALIVRCPR

SEQ ID NO: 232 - protein, 425 aa, Homo sapiens
MVSKALLRLVSAVNRRRMKLLLGIALLAYVASVWGNFVNMSFLLNRSIQENGELKIESKIEEMVEPLREKIRDLEKSFTQKYPPVKFLSEKDRKRILITGGAGFVGSHLTDKLMMDGHEVTVVDNFFTGRKRNVEHWIGHENFELINHDVVEPLYIEVDQIYHLASPASPPNYMYNPIKTLKTNTIGTLNMLGLAKRVGARLLLASTSEVYGDPEVHPQSEDYWGHVNPIGPRACYDEGKRVAETMCYAYMKQEGVEVRVARIFNTFGPRMHMNDGRVVSNFILQALQGEPLTVYGSGSQTRAFQYVSDLVNGLVALMNSNVSSPVNLGNPEEHTILEFAQLIKNLVGSGSEIQFLSEAQDDPQKRKPDIKKAKLMLGWEPVVPLEEGLNKAIHYFRKELEYQANNQYIPKPKPARIKKGRTRHS

SEQ ID NO: 233 - protein, 420 aa, Homo sapiens
MVSKALLRLVSAVNRRRMKLLLGIALLAYVASVWGNFVNMRSIQENGELKIESKIEEMVEPLREKIRDLEKSFTQKYPPVKFLSEKDRKRILITGGAGFVGSHLTDKLMMDGHEVTVVDNFFTGRKRNVEHWIGHENFELINHDVVEPLYIEVDQIYHLASPASPPNYMYNPIKTLKTNTIGTLNMLGLAKRVGARLLLASTSEVYGDPEVHPQSEDYWGHVNPIGPRACYDEGKRVAETMCYAYMKQEGVEVRVARIFNTFGPRMHMNDGRVVSNFILQALQGEPLTVYGSGSQTRAFQYVSDLVNGLVALMNSNVSSPVNLGNPEEHTILEFAQLIKNLVGSGSEIQFLSEAQDDPQKRKPDIKKAKLMLGWEPVVPLEEGLNKAIHYFRKELEYQANNQYIPKPKPARIKKGRTRHS

SEQ ID NO: 234 - protein, 171 aa, Homo sapiens [sequence omitted]

SEQ ID NO: 235 - protein, 190 aa, Homo sapiens
MVEPLREKIRDLEKSFTQKYPPVKFLSEKDRKRILITGGAGFVGSHLTDKLMMDGHEVTVVDNFFTGRKRNVEHWIGHENFELINHDVVEPLYIEVDQIYHLASPASPPNYMYNPIKTLKTNTIGTLNMLGLAKRVGARLLLASTSEVYGDPEVHPQSEDYWGHVNPIGPRACYDEGKRVAETMCYAYMK

SEQ ID NO: 236 - protein, 210 aa, Homo sapiens
MAVKVQTTKRGDPHELRNIFLQYASTEVDGERYMTPEDFVQRYLGLYNDPNSNPKIVQLLAGVADQTKDGLISYQEFLAFESVLCAPDSMFIVAFQLFDKSGNGEVTFGGVLWPHRWYSSSFQAHSWNRHGGSLGEECQPRSEKMSKKFLDRLLFIIISLLTGIVNLSDCILGITGRSILTTQNSRSFSRSCNWNMQDKPLHSKTKAKVA

SEQ ID NO: 237 - protein, 870 aa, Homo sapiens
MGVKKKKEMQVAALTICHQDLETLKSFADVEGKNLASLLLHCVQLTDGVSQIHYIKQIVPLLEKADKNGMCDPTIQSCLDILAGIYLSLSLKNPLKKVLASSLNSLPDFFLPEAMHRFTSRLQEELNTTDLYSYRKVTDNISSCMENFNLGRASVNNLLKNVLHFLQKSLIEILEENRKCAGNHIIQTQLMNDLLVGIRVSMMLVQKVQDFQGNLWKTSDSPIWQNMCGLLSIFTKVLSDDDLLQTVQSTSGLAIILFIKTMFHPSEKIPHLISSVLLRSVDCTSVPEWFMSSCRSLCCGDISQSAVLFLCQGTLAMLDWQNGSMGRSGEALLLDTAHVLFTLSSQIKEPTLEMFLSRILASWTNSAIQVLESSSPSLTDSLNGNSSIVGRLLEYVYTHWEHPLDALRHQTKIMFKNLLQMHRLTVEGADFVPDPFFVELTESLLRLEWHIKGKYTCLGCLVECIGVEHILAIDKTIPSQILEVMGDQSLVPYASDLLETMFRNHKSHLKSQTAESSWIDQWHETWVSPLLFILCEGNLDQKSYVIDYYLPKLLSYSPESLQYMVKILQTSIDAKTGQEQSFPSLGSCNSRGALGALMACLRIARAHGHLQSATDTWENLVSDARIKQGLIHQHCQVRIDTLGLLCESNRSTEIVSMEEMQWIQFFITYNLNSQSPGVRQQICSLLKKLFCRIQESSQVLYKLEQSKSKREPENELTKQHPSVSLQQYKNFMSSICNSLFEALFPGSSYSTRFSALTILGSIAEVFHVPEGKCLIMLGEVIFVFFQNILILHFALFEVSVLLPFFEVSFLPYNSCLYIMKFASKGQKRKKLSPFSLIIICQPQSIIFMDYAYYGKSSSYYLTNLFVAVLR

SEQ ID NO: 238 - protein, 906 aa, Homo sapiens
MICQKFCVVLLHWEFIYVITAFNLSYPITPWRFKLSCMPPNSTYDYFLLPAGLSKNTSNSNGHYETAVEPKFNSSGTHFSNLSKTTFHCCFRSEQDRNCSLCADNIEGKTFVSTVNSLVFQQIDANWNIQCWLKGDLKLFICYVESLFKNLFRNYNYKVHLLYVLPEVLEDSPLVPQKGSFQMVHCNCSVHECCECLVPVPTAKLNDTLLMCLKITSGGVIFQSPLMSVQPINMVKPDPPLGLHMEITDDGNLKISWSSPPLVPFPLQYQVKYSENSTTVIREADKIVSATSLLVDSILPGSSYEVQVRGKRLDGPGIWSDWSTPRVFTTQDVIYFPPKILTSVGSNVSFHCIYKKENKIVPSKEIVWWMNLAEKIPQSQYDVVSDHVSKVTFFNLNETKPRGKFTYDAVYCCNEHECHHRYAELYVIDVNINISCETDGYLTKMTCRWSTSTIQSLAESTLQLRYHRSSLYCSDIPSIHPISEPKDCYLQSDGFYECIFQPIFLLSGYTMWIRINHSLGSLDSPPTCVLPDSVVKPLPPSSVKAEITINIGLLKISWEKPVFPENNLQFQIRYGLSGKEVQWKMYEVYDAKSKSVSLPVPDLCAVYAVQVRCKRLDGLGYWSNWSNPAYTVVMDIKVPMRGPEFWRIINGDTMKKEKNVTLLWKPLMKNDSLCSVQRYVINHHTSCNGTWSEDVGNHTKFTFLWTEQAHTVTVLAINSIGASVANFNLTFSWPMSKVNIVQSLSAYPLNSSCVIVSWILSPSDYKLMYFIIEWKNLNEDGEIKWLRISSSVKKYYIHDHFIPIEKYQFSLYPIFMEGVGKPKIINSFTQDDIEKHQSDAGLYVIVPVIISSSILLLGTLLISHQRMKKLFWEDVPNPKNCSWAQGLNFQKKMPGTKELLGGGWLT

SEQ ID NO: 239 - protein, 1165 aa, Homo sapiens
MICQKFCVVLLHWEFIYVITAFNLSYPITPWRFKLSCMPPNSTYDYFLLPAGLSKNTSNSNGHYETAVEPKFNSSGTHFSNLSKTTFHCCFRSEQDRNCSLCADNIEGKTFVSTVNSLVFQQIDANWNIQCWLKGDLKLFICYVESLFKNLFRNYNYKVHLLYVLPEVLEDSPLVPQKGSFQMVHCNCSVHECCECLVPVPTAKLNDTLLMCLKITSGGVIFQSPLMSVQPINMVKPDPPLGLHMEITDDGNLKISWSSPPLVPFPLQYQVKYSENSTTVIREADKIVSATSLLVDSILPGSSYEVQVRGKRLDGPGIWSDWSTPRVFTTQDVIYFPPKILTSVGSNVSFHCIYKKENKIVPSKEIVWWMNLAEKIPQSQYDVVSDHVSKVTFFNLNETKPRGKFTYDAVYCCNEHECHHRYAELYVIDVNINISCETDGYLTKMTCRWSTSTIQSLAESTLQLRYHRSSLYCSDIPSIHPISEPKDCYLQSDGFYECIFQPIFLLSGYTMWIRINHSLGSLDSPPTCVLPDSVVKPLPPSSVKAEITINIGLLKISWEKPVFPENNLQFQIRYGLSGKEVQWKMYEVYDAKSKSVSLPVPDLCAVYAVQVRCKRLDGLGYWSNWSNPAYTVVMDIKVPMRGPEFWRIINGDTMKKEKNVTLLWKPLMKNDSLCSVQRYVINHHTSCNGTWSEDVGNHTKFTFLWTEQAHTVTVLAINSIGASVANFNLTFSWPMSKVNIVQSLSAYPLNSSCVIVSWILSPSDYKLMYFIIEWKNLNEDGEIKWLRISSSVKKYYIHDHFIPIEKYQFSLYPIFMEGVGKPKIINSFTQDDIEKHQSDAGLYVIVPVIISSSILLLGTLLISHQRMKKLFWEDVPNPKNCSWAQGLNFQKPETFEHLFIKHTASVTCGPLLLEPETISEDISVDTSWKNKDEMMPTTVVSLLSTTDLEKGSVCISDQFNSVNFSEAEGTEVTYEDESQRQPFVKYATLISNSKPSETGEEQGLINSSVTKCFSSKNSPLKDSFSNSSWEIEAQAFFILSDQHPNIISPHLTFSEGLDELLKLEGNFPEENNDKKSIYYLGVTSIKKRESGVLLTDKSRVSCPFPAPCLFTDIRVLQDSCSHFVENNINLGTSSKKTFASYMPQFQTCSTQTHKIMENKMCDLTV

SEQ ID NO: 240 - protein, 906 aa, Homo sapiens; identical to SEQ ID NO: 238

SEQ ID NO: 241 - protein, 958 aa, Homo sapiens
MICQKFCVVLLHWEFIYVITAFNLSYPITPWRFKLSCMPPNSTYDYFLLPAGLSKNTSNSNGHYETAVEPKFNSSGTHFSNLSKTTFHCCFRSEQDRNCSLCADNIEGKTFVSTVNSLVFQQIDANWNIQCWLKGDLKLFICYVESLFKNLFRNYNYKVHLLYVLPEVLEDSPLVPQKGSFQMVHCNCSVHECCECLVPVPTAKLNDTLLMCLKITSGGVIFQSPLMSVQPINMVKPDPPLGLHMEITDDGNLKISWSSPPLVPFPLQYQVKYSENSTTVIREADKIVSATSLLVDSILPGSSYEVQVRGKRLDGPGIWSDWSTPRVFTTQDVIYFPPKILTSVGSNVSFHCIYKKENKIVPSKEIVWWMNLAEKIPQSQYDVVSDHVSKVTFFNLNETKPRGKFTYDAVYCCNEHECHHRYAELYVIDVNINISCETDGYLTKMTCRWSTSTIQSLAESTLQLRYHRSSLYCSDIPSIHPISEPKDCYLQSDGFYECIFQPIFLLSGYTMWIRINHSLGSLDSPPTCVLPDSVVKPLPPSSVKAEITINIGLLKISWEKPVFPENNLQFQIRYGLSGKEVQWKMYEVYDAKSKSVSLPVPDLCAVYAVQVRCKRLDGLGYWSNWSNPAYTVVMDIKVPMRGPEFWRIINGDTMKKEKNVTLLWKPLMKNDSLCSVQRYVINHHTSCNGTWSEDVGNHTKFTFLWTEQAHTVTVLAINSIGASVANFNLTFSWPMSKVNIVQSLSAYPLNSSCVIVSWILSPSDYKLMYFIIEWKNLNEDGEIKWLRISSSVKKYYIHDHFIPIEKYQFSLYPIFMEGVGKPKIINSFTQDDIEKHQSDAGLYVIVPVIISSSILLLGTLLISHQRMKKLFWEDVPNPKNCSWAQGLNFQKMLEGSMFVKSHHHSLISSTQGHKHCGRPQGPLHRKTRDLCSLVYLLTLPPLLSYDPAKSPSVRNTQE

SEQ ID NO: 242 - protein, 896 aa, Homo sapiens
MICQKFCVVLLHWEFIYVITAFNLSYPITPWRFKLSCMPPNSTYDYFLLPAGLSKNTSNSNGHYETAVEPKFNSSGTHFSNLSKTTFHCCFRSEQDRNCSLCADNIEGKTFVSTVNSLVFQQIDANWNIQCWLKGDLKLFICYVESLFKNLFRNYNYKVHLLYVLPEVLEDSPLVPQKGSFQMVHCNCSVHECCECLVPVPTAKLNDTLLMCLKITSGGVIFQSPLMSVQPINMVKPDPPLGLHMEITDDGNLKISWSSPPLVPFPLQYQVKYSENSTTVIREADKIVSATSLLVDSILPGSSYEVQVRGKRLDGPGIWSDWSTPRVFTTQDVIYFPPKILTSVGSNVSFHCIYKKENKIVPSKEIVWWMNLAEKIPQSQYDVVSDHVSKVTFFNLNETKPRGKFTYDAVYCCNEHECHHRYAELYVIDVNINISCETDGYLTKMTCRWSTSTIQSLAESTLQLRYHRSSLYCSDIPSIHPISEPKDCYLQSDGFYECIFQPIFLLSGYTMWIRINHSLGSLDSPPTCVLPDSVVKPLPPSSVKAEITINIGLLKISWEKPVFPENNLQFQIRYGLSGKEVQWKMYEVYDAKSKSVSLPVPDLCAVYAVQVRCKRLDGLGYWSNWSNPAYTVVMDIKVPMRGPEFWRIINGDTMKKEKNVTLLWKPLMKNDSLCSVQRYVINHHTSCNGTWSEDVGNHTKFTFLWTEQAHTVTVLAINSIGASVANFNLTFSWPMSKVNIVQSLSAYPLNSSCVIVSWILSPSDYKLMYFIIEWKNLNEDGEIKWLRISSSVKKYYIHDHFIPIEKYQFSLYPIFMEGVGKPKIINSFTQDDIEKHQSDAGLYVIVPVIISSSILLLGTLLISHQRMKKLFWEDVPNPKNCSWAQGLNFQKRTDIL

SEQ ID NO: 243 - protein, 232 aa, Homo sapiens
MMPTTVVSLLSTTDLEKGSVCISDQFNSVNFSEAEGTEVTYEDESQRQPFVKYATLISNSKPSETGEEQGLINSSVTKCFSSKNSPLKDSFSNSSWEIEAQAFFILSDQHPNIISPHLTFSEGLDELLKLEGNFPEENNDKKSIYYLGVTSIKKRESGVLLTDKSRVSCPFPAPCLFTDIRVLQDSCSHFVENNINLGTSSKKTFASYMPQFQTCSTQTHKIMENKMCDLTV

SEQ ID NO: 244 - protein, 896 aa, Homo sapiens; identical to SEQ ID NO: 242

SEQ ID NO: 245 - protein, 214 aa, Homo sapiens
MGLRDWLRTVCCCCGCECLEERALPEKEPLVSDNNPYSSFGATLVRDDEKNLWSMPHDVSHTEADDDRTLYNLIVIRNQQAKDSEEWQKLNYDIHTLRQVRREVRNRWKCILEDLGFQKEADSLLSVTKLSTISDSKNTRKAREMLLKLAEETNIFPTSWELSERYLFVVDRLIALDAAEEFFKLARRTYPKKPGVPCLADGQKELHYLPFPSP

SEQ ID NO: 246 - protein, 214 aa, Homo sapiens; identical to SEQ ID NO: 245

SEQ ID NO: 247 - protein, 526 aa, Homo sapiens
MVNEGPNQEESDDTPVPESALQADPSVSVHPSVSVHPSVSINPSVSVHPSSSAHPSALAQPSGLAHPSSSGPEDLSVIKVSRRRWAVVLVFSCYSMCNSFQWIQYGSINNIFMHFYGVSAFAIDWLSMCYMLTYIPLLLPVAWLLEKFGLRTIALTGSALNCLGAWVKLGSLKPHLFPVTVVGQLICSVAQVFILGMPSRIASVWFGANEVSTACSVAVFGNQLGIAIGFLVPPVLVPNIEDRDELAYHISIMFYIIGGVATLLLILVIIVFKEKPKYPPSRAQSLSYALTSPDASYLGSIARLFKNLNFVLLVITYGLNAGAFYALSTLLNRMVIWHYPGEEVNAGRIGLTIVIAGMLGAVISGIWLDRSKTYKETTLVVYIMTLVGMVVYTFTLNLGHLWVVFITAGTMGFFMTGYLPLGFEFAVELTYPESEGISSGLLNISAQVFGIIFTISQGQIIDNYGTKPGNIFLCVFLTLGAALTAFIKADLRRQKANKETLENKLQEEEEESNTSKVPTAVSEDHL

SEQ ID NO: 248 - protein, 321 aa, Homo sapiens
MSADNSSTICVCRSVRQELGIAIGFLVPPVLVPNIEDRDELAYHISIMFYIIGGVATLLLILVIIVFKEKPKYPPSRAQSLSYALTSPDASYLGSIARLFKNLNFVLLVITYGLNAGAFYALSTLLNRMVIWHYPGEEVNAGRIGLTIVIAGMLGAVISGIWLDRSKTYKETTLVVYIMTLVGMVVYTFTLNLGHLWVVFITAGTMGFFMTGYLPLGFEFAVELTYPESEGISSGLLNISAQVFGIIFTISQGQIIDNYGTKPGNIFLCVFLTLGAALTAFIKADLRRQKANKETLENKLQEEEEESNTSKVPTAVSEDHL

SEQ ID NO: 249 - protein, 203 aa, Homo sapiens
MFYIIGGVATLLLILVIIGLNAGAFYALSTLLNRMVIWHYPGEEVNAGRIGLTIVIAGMLGAVISGIWLDRSKTYKETTLVVYIMTLVGMVVYTFTLNLGHLWVVFITAGTMGFFMTGYLPLGFEFAVELTYPESEGISSGLLNISAQVFGIIFTISQGQIIDNYGTKPGNIFLCVFLTLGAALTAFIKADLRRQKANKETLE

SEQ ID NO: 250 - protein, 133 aa, Homo sapiens
MFYIIGGVATLLLILVIIVFKEKPKYPPSRAQSLSYALTSPDASYLGSIARLFKNLNFVLLVITYGLNAGAFYALSTLLNRMVIWHYPGEEVNAGRIGLTIVIAGMLGAVISGIWLDRSKTYKNLCHPNCLIQ

SEQ ID NO: 251 - protein, 203 aa, Homo sapiens
MSPYGISSLGNGLSKWLSLNAGAFYALSTLLNRMVIWHYPGEEVNAGRIGLTIVIAGMLGAVISGIWLDRSKTYKETTLVVYIMTLVGMVVYTFTLNLGHLWVVFITAGTMGFFMTGYLPLGFEFAVELTYPESEGISSGLLNISAQVFGIIFTISQGQIIDNYGTKPGNIFLCVFLTLGAALTAFIKADLRRQKANKETLEN

SEQ ID NO: 252 - protein, 241 aa, Homo sapiens
MCPDLHPSKYVQPPLSSSSSPLKGGQEAFSPLGLNAGAFYALSTLLNRMVIWHYPGEEVNAGRIGLTIVIAGMLGAVISGIWLDRSKTYKETTLVVYIMTLVGMVVYTFTLNLGHLWVVFITAGTMGFFMTGYLPLGFEFAVELTYPESEGISSGLLNISAQVFGIIFTISQGQIIDNYGTKPGNIFLCVFLTLGAALTAFIKADLRRQKANKETLENKLQEEEEESNTSKVPTAVSEDHL

SEQ ID NO: 253 - protein, 88 aa, Homo sapiens
MFYIIGGVATLLLILVIIVFKEKPKYPPSRAQSLSYALTSPDASYLGSIARLFKNLNFVLLVITYGLNAGAFYALSTLLNRMVIWHYP

SEQ ID NO: 254 - protein, 93 aa, Homo sapiens
MFYIIGGVATLLLILVIIVFKEKPKYPPSRAQSLSYALTSPDASYLGSIARLFKNLNFVLLVITYETPRGGGGEQHQQSAHCCVRGSSLRGRW

SEQ ID NO: 255 - protein, 102 aa, Homo sapiens
MTLRCLEPSGNGGEGTRSQWGTAGSAEEPSPQAARLAKALRELGQTGREPIGRDACGRERLPKEAARKRGRGGKQRIRWKYVPCFQGTAESTLAGSWVLGNA

SEQ ID NO: 256 - protein, 46 aa, Homo sapiens
  misc_feature (1)..(1): Xaa can be any naturally occurring amino acid
XAPSLQHLCRLTINKCTGAIWGLPLPTRLKDYLEEYKFQPAVFYPG

SEQ ID NO: 257 - protein, 341 aa, Homo sapiens
MNIVVEFFVVTFKVLWAFVLAAARWLVRPKEKSVAGQVCLITGAGSGLGRLFALEFARRRALLVLWDINTQSNEETAGMVRHIYRDLEAADAAALQAGNGEEEILPHCNLQVFTYTCDVGKRENVYLTAERVRKEVGEVSVLVNNAGVVSGHHLLECPDELIERTMMVNCHAHFWTTKAFLPTMLEINHGHIVTVASSLGLFSTAGVEDYCASKFGVVGFHESLSHELKAAEKDGIKTTLVCPYLVDTGMFRGCRIRKEIEPFLPPLKPDYCVKQAMKAILTDQPMICTPRLMYIVTFMKSILPFEAVVCMYRFLGADKCMYPFIAQRKQATNNNEAKNGI

SEQ ID NO: 258 - protein, 176 aa, Homo sapiens
MMVNCHAHFWTTKAFLPTMLEINHGHIVTVASSLGLFSTAGVEDYCASKFGVVGFHESLSHELKAAEKDGIKTTLVCPYLVDTGMFRGCRIRKEIEPFLPPLKPDYCVKQAMKAILTDQPMICTPRLMYIVTFMKSILPFEAVVCMYRFLGADKCMYPFIAQRKQATNNNEAKNGI

SEQ ID NO: 259 - protein, 62 aa, Homo sapiens
MMVNCHAHFWTTKAFLPTMLEINHGHIVTVASSLGLFSTAGVEDYCASKFGVVGFHESLSHE

SEQ ID NO: 260 - protein, 382 aa, Homo sapiens
MRSHFLQWALATSRNKDQITNIFSGFAGLLAILLVVAVFCILWNWNKRKKRQVPYLRVTVMPLLTLPQTRQRAKNIYDILPWRQEDLGRHESRSMRIFSTESLLSRNSESPEHVPSQAGNAFQEHTAHIHATEYAVGIYDNAMVPQMCGNLTPSAHCINVRASRDCASISSEDSHDYVNVPTAEEIAETLASTKSPSRNLFVLPSTQKLEFTEERDEGCGDAGDCTSLYSPGAEDSDSLSNGEGSSQISNDYVNMTGLDLSAIQERQLWVAFQCCRDYENVPAADPSGSQQQAEKDVPSSNIGHVEDKTDDPGTHVQCVKRTFLASGDYADFQPFTQSEDSQMKHREEMSNEDSSDYENVLTAKLGGRDSEQGPGTQLLPDE

SEQ ID NO: 261 - protein, 398 aa, Homo sapiens
MDGVTPTLSTIRGRTLESSTLHVTPRSLDRNKDQITNIFSGFAGLLAILLVVAVFCILWNWNKRKKRQVPYLRVTVMPLLTLPQTRQRAKNIYDILPWRQEDLGRHESRSMRIFSTESLLSRNSESPEHVPSQAGNAFQEHTAHIHATEYAVGIYDNAMVPQMCGNLTPSAHCINVRASRDCASISSEDSHDYVNVPTAEEIAETLASTKSPSRNLFVLPSTQKLEFTEERDEGCGDAGDCTSLYSPGAEDSDSLSNGEGSSQISNDYVNMTGLDLSAIQERQLWVAFQCCRDYENVPAADPSGSQQQAEKDVPSSNIGHVEDKTDDPGTHVQCVKRTFLASGDYADFQPFTQSEDSQMKHREEMSNEDSSDYENVLTAKLGGRDSEQGPGTQLLPDE

SEQ ID NO: 262 - protein, 48 aa, Homo sapiens
MEAAETEAEAAALEVLAEVAGILEPVGLQEEAELPAKILVEFVVVCTR

SEQ ID NO: 263 - protein, 439 aa, Homo sapiens
MRRAALRLCALGKGQLTPGRGLTQGPQNPKKQGIFHIHEVRDKLREIVGASTNWRDHVKAMEERKLLHSFLAKSQDGLPPRRMKDSYIEVLLPLGSEPELREKYLTVQNTVRFGRILEDLDSLGVLICYMHNKIHSAKMSPLSIVTALVDKIDMCKKSLSPEQDIKFSGHVSWVGKTSMEVKMQMFQLHGDEFCPVLDATFVMVARDSENKGPAFVNPLIPESPEEEELFRQGELNKGRRIAFSSTSLLKMAPSAEERTTIHEMFLSTLDPKTISFRSRVLPSNAVWMENSKLKSLEICHPQERNIFNRIFGGFLMRKAYELAWATACSFGGSRPFVVAVDDIMFQKPVEVGSLLFLSSQVCFTQNNYIQVRVHSEVASLQEKQHTTTNVFHFTFMSEKEVPLVFPKTYGESMLYLDGQRHFNSMSGPATLRKDYLVEP

SEQ ID NO: 264 - protein, 448 aa, Homo sapiens
MRRAALRLCALGKGQLTPGRGLTQGPQNPKKQGIFHIHEACSSIHVNHVRDKLREIVGASTNWRDHVKAMEERKLLHSFLAKSQDGLPPRRMKDSYIEVLLPLGSEPELREKYLTVQNTVRFGRILEDLDSLGVLICYMHNKIHSAKMSPLSIVTALVDKIDMCKKSLSPEQDIKFSGHVSWVGKTSMEVKMQMFQLHGDEFCPVLDATFVMVARDSENKGPAFVNPLIPESPEEEELFRQGELNKGRRIAFSSTSLLKMAPSAEERTTIHEMFLSTLDPKTISFRSRVLPSNAVWMENSKLKSLEICHPQERNIFNRIFGGFLMRKAYELAWATACSFGGSRPFVVAVDDIMFQKPVEVGSLLFLSSQVCFTQNNYIQVRVHSEVASLQEKQHTTTNVFHFTFMSEKEVPLVFPKTYGESMLYLDGQRHFNSMSGPATLRKDYLVEP

SEQ ID NO: 265 - protein, 46 aa, Homo sapiens
MRRAALRLCALGKGQLTPGRGLTQGPQNPKKQGIFHIHEGKHGVSV

SEQ ID NO: 266 - protein, 663 aa, Homo sapiens
MSARLPVLSPPRWPRLLLLSLLLLGAVPGPRRSGAFYLPGLAPVNFCDEEKKSDECKAEIELFVNRLDSVESVLPYEYTAFDFCQASEGKRPSENLGQVLFGERIEPSPYKFTFNKKETCKLVCTKTYHTEKAEDKQKLEFLKKSMLLNYQHHWIVDNMPVTWCYDVEDGQRFCNPGFPIGCYITDKGHAKDACVISSDFHERDTFYIFNHVDIKIYYHVVETGSMGARLVAAKLEPKSFKHTHIDKPDCSGPPMDISNKASGEIKIAYTYSVSFEEDDKIRWASRWDYILESMPHTHIQWFSIMNSLVIVLFLSGMVAMIMLRTLHKDIARYNQMDSTEDAQEEFGWKLVHGDIFRPPRKGMLLSVFLGSGTQILIMTFVTLFFACLGFLSPANRGALMTCAVVLWVLLGTPAGYVAARFYKSFGGEKWKTNVLLTSFLCPGIVFADFFIMNLILWGEGSSAAIPFGTLVAILALWFCISVPLTFIGAYFGFKKNAIEHPVRTNQIPRQIPEQSFYTKPLPGIIMGGILPFGCIFIQLFFILNSIWSHQMYYMFGFLFLVFIILVITCSEATILLCYFHLCAEDYHWQWRSFLTSGFTAVYFLIYAVHYFFSKLQITGTASTILYFGYTMIMVLIFFLFTGTIGFFACFWFVTKIYSVVKVD

SEQ ID NO: 267 - protein, 390 aa, Homo sapiens
MGQRLSGGRSCLDVPGRLLPQPPPPPPPVRRKLALLFAMLCVWLYMFLYSCAGSCAAAPGLLLLGSGSRAAHDPPALATAPDGTPPRLPFRAPPATPLASGKEMAEGAASPEEQSPEVPDSPSPISSFFSGSGSKQLPQAIIIGVKKGGTRALLEFLRVHPDVRAVGAEPHFFDRSYDKGLAWYRDLMPRTLDGQITMEKTPSYFVTREAPARISAMSKDTKLIVVVRDPVTRAISDYTQTLSKRPDIPTFESLTFKNRTAGLIDTSWSAIQIGIYAKHLEHWLRHFPIRQMLFVSGERLISDPAGELGRVQDFLGLKRIITDKHFYFNKTKGFPCLKKAEGSSRPHCLGKTKGRTHPEIDREVVRRLREFYRPFNLKFYQMTGHDFGWD

SEQ ID NO: 268 - protein, 390 aa, Homo sapiens; identical to SEQ ID NO: 267

SEQ ID NO: 269 - protein, 649 aa, Homo sapiens
MSSFGAGKTKEVIFSVEDGSVKMFLRGRPVPMMIPDELAPTYSLDTRSELPSCRLKLEWVYGYRGRDCRANLYLLPTGEIVYFVASVAVLYSVEEQRQRHYLGHNDDIKCLAIHPDMVTIATGQVAGTTKEGKPLPPHVRIWDSVSLSTLHVLGLGVFDRAVCCVGFSKSNGGNLLCAVDESNDHMLSVWDWAKETKVVDVKCSNEAVLVATFHPTDPTVLITCGKSHIYFWTLEGGSLSKRQGLFEKHEKPKYVLCVTFLEGGDVVTGDSGGNLYVWGKGGNRITQAVLGAHDGGVFGLCALRDGTLVSGGGRDRRVVLWGSDYSKLQEVEVPEDFGPVRTVAEGHGDTLYVGTTRNSILQGSVHTGFSLLVQGHVEELWGLATHPSRAQFVTCGQDKLVHLWSSDSHQPLWSRIIEDPARSAGFHPSGSVLAVGTVTGRWLLLDTETHDLVAIHTDGNEQISVVSFSPDGAYLAVGSHDNLVYVYTVDQGGRKVSRLGKCSGHSSFITHLDWAQDSSCFVTNSGDYEILYWDPATCKQITSADAVRNMEWATATCVLGFGVFGIWSEGADGTDINAVARSHDGKLLASADDFGKVHLFSYPCCQPRALSHKYGGHSSHVTNVAFLWDDSMALTTGGKDTSVLQWRVV

SEQ ID NO: 270 - protein, 145 aa, Homo sapiens
MSSFGAGKTKEVIFSVAWPSTQIWSPSPRDRWREPLRKGSRCRPTCASGTQFPSPPYTCWAWGCLTEPCAVWASPNLMEATCCVQWMNPMITCSRCGTGPRRPRWWMSSAPMRLYWWPPSTPRTPLCLSPAGNLTSTSGPWRGAA

SEQ ID NO: 271 - protein, 76 aa, Homo sapiens
  misc_feature (1)..(1): Xaa can be any naturally occurring amino acid
XGRKVSRLGKCSGHSSFITHLDWAQDSSCFVTNSGDYEILYLEMGFHHLGQAGLELLTSGDPARCCGSCCLLGLQT

SEQ ID NO: 272 - protein, 225 aa, Homo sapiens
MFLRGRPVPMMIPDELAPTYSLDTRSELPSCRLKLEWVYGYRGRDCRANLYLLPTGEIVYFVASVAVLYSVEEQRQRHYLGHNDDIKCLAIHPDMVTIATGQVAGTTKEGKPLPPHVRIWDSVSLSTLHVLGLGVFDRAVCCVGFSKSNGGNLLCAVDESNDHMLSVWDWAKETKVVDVKCSNEAVLVATFHPTDPTVLITCGKSHIYFWTLEGGSLSKRQGLFE

SEQ ID NO: 273 - protein, 850 aa, Homo sapiens
MLERRALLWQREAGPGWGDRARAGTGGAGGGCGGAMAERGPAFCGLYDTSSLLRYCNDDNLSGTSGMEVDDRVSALEQRLQLQEDELAVLKAALADALRRLRACEEQGAALRARGTPKGRAPPRLGTTASVCQLLKGLPTRTPLNGSGPPRRVGGYATSPSSPKKEATSGRSSVRRYLSPERLASVRREDPRSRTTSSSSNCSAKKEGKTKEVIFSVEDGSVKMFLRGRPVPMMIPDELAPTYSLDTRSELPSCRLKLEWVYGYRGRDCRANLYLLPTGEIVYFVASVAVLYSVEEQRQRHYLGHNDDIKCLAIHPDMVTIATGQVAGTTKEGKPLPPHVRIWDSVSLSTLHVLGLGVFDRAVCCVGFSKSNGGNLLCAVDESNDHMLSVWDWAKETKVVDVKCSNEAVLVATFHPTDPTVLITCGKSHIYFWTLEGGSLSKRQGLFEKHEKPKYVLCVTFLEGGDVVTGDSGGNLYVWGKGGNRITQAVLGAHDGGVFGLCALRDGTLVSGGGRDRRVVLWGSDYSKLQEVEVPEDFGPVRTVAEGHGDTLYVGTTRNSILQGSVHTGFSLLVQGHVEELWGLATHPSRAQFVTCGQDKLVHLWSSDSHQPLWSRIIEDPARSAGFHPSGSVLAVGTVTGRWLLLDTETHDLVAIHTDGNEQISVVSFSPDGAYLAVGSHDNLVYVYTVDQGGRKVSRLGKCSGHSSFITHLDWAQDSSCFVTNSGDYEILYWDPATCKQITSADAVRNMEWATATCVLGFGVFGIWSEGADGTDINAVARSHDGKLLASADDFGKVHLFSYPCCQPRALSHKYGGHSSHVTNVAFLWDDSMALTTGGKDTSVLQWRVV

SEQ ID NO: 274 - protein, 73 aa, Homo sapiens
  misc_feature (1)..(1): Xaa can be any naturally occurring amino acid
XHQPLWSRIIEDPARSAGFHPSGSVLAVGTVTGRWLLLDTETHDLVAIHTDGNEQISVVSFSPGPFQFYHPPG

SEQ ID NO: 275 - protein, 121 aa, Homo sapiens
  misc_feature (1)..(1): Xaa can be any naturally occurring amino acid
XLCAVDESNDHMLSVWDWAKETKVVDVKVPEDFGPVRTVAEGHGDTLYVGTTRNSILQGSVHTGFSLLVQGHVEELWGLATHPSRAQFVTCGQDKLVHLWSSDSHQPLWSRIIEDPARSAG

SEQ ID NO: 276 - protein, 427 aa, Homo sapiens
MSSFGAGKTKEVIFSVEDGSVKMFLRGRPVPMMIPDELAPTYSLDTRSELPSCRLKLEWVYGYRGRDCRANLYLLPTGEIVYFVASVAVLYSVEEQRQRHYLGHNDDIKCLAIHPDMVTIATGQVAGTTKEGKPLPPHVRIWDSVSLSTLHVLGLGVFDRAVCCVGFSKSNGGNLLCAVDESNDHMLSVWDWAKETKVVDVKCSNEAVLVATFHPTDPTVLITCGKSHIYFWTLEGGSLSKRQGLFEKHEKPKYVLCVTFLEGGDVVTGDSGGNLYVWGKGGNRITQAVLGAHDGGVFGLCALRDGTLVSGGGRDRRVVLWGSDYSKLQEVEVPEDFGPVRTVAEGHGDTLYVGTTRNSILQGSVHTGFSLLVQGHVEELWGLATHPSRAQFVTCGQDKLVHLWSSDSHQPLWSRIIEMAAAGHGDP

SEQ ID NO: 277 - protein, 773 aa, Homo sapiens
MSSFGAGKTKEVIFSVEDGSVKMFLRGRPVPMMIPDELAPTYSLDTRSELPSCRLKLEWVYGYRGRDCRANLYLLPTGEIVYFVASVAVLYSVEEQRQRHYLGHNDDIKCLAIHPDMVTIATGQVAGTTKEGKPLPPHVRIWDSVSLSTLHVLGLGVFDRAVCCVGFSKSNGGNLLCAVDESNDHMLSVWDWAKETKVVDVKCSNEAVLVATFHPTDPTVLITCGKSHIYFWTLEGGSLSKRQGLFEKHEKPKYVLCVTFLEGGDVVTGDSGGNLYVWGKGGNRITQAVLGAHDGGVFGLCALRDGTLVSGGGRDRRVVLWGSDYSKLQEVEVPEDFGPVRTVAEGHGDTLYVGTTRNSILQGSVHTGFSLLVQGHVEELWGLATHPSRAQFVTCGQDKLVHLWSSDSHQPLWSRIIEDPARSAGFHPSGSVLAVGTVTGRWLLLDTETHDLVAIHTDGNEQISVVSFSPDGAYLAVGSHDNLVYVYTVDQGGRKVSRLGKCSGHSSFITHLDWAQDSSCFVTNSGDYEILYWDPATCKQITSADAVRNMEWATATCVLGFGVFGIWSEGADGTDINAVARSHDGKLLASADDFGKVHLFSYPCCQPRVLGKWPSAAEAALSSGIRVLFRPLVASLGPAWKNVPRKFCWKSAGDSPRDPPPRPQGHSQPSFPSSGPWETAVCKFYRQGRWREVRVFASWAPPCIPHSQWLWFPSSEPQFLWELELSLETGNRLPPCPFCPRLAMASCPLRMVPWGRPILCGFLHSAHPSINCP

SEQ ID NO: 278 - protein, 98 aa, Homo sapiens
MFLRGRPVPMMIPDELAPTYSLDTRSELPSCRLKLEWVYGYRGRDCRANLYLLPTGEIVYFVASVAVLYSVEEQRQRHYLGHNDDIKCLAIHPDMVTI

SEQ ID NO: 279 - protein, 111 aa, Homo sapiens
MFLRGRPVPMMIPDELAPTYSLDTRSELPSCRLKLEWVYGYRGRDCRANLYLLPTGEIVYFVASVAVLYSVEEQRQRHYLGHNDDIKCLAIHPDMVTIATGQVAGTTKEGK

SEQ ID NO: 280 - protein, 51 aa, Homo sapiens
WTLEGGSLSKRQGLFEKHEKPKYVLCVTFLEGGDVVTGDSGGNLYVWGKGP

SEQ ID NO: 281 - protein, 148 aa, Homo sapiens
MFLRGRPVPMMIPDELAPTYSLDTRSELPSCRLKLEWVYGYRGRDCRANLYLLPTGEIVYFVASVAVLYSVEEQRQRHYLGHNDDIKCLAIHPDMVTIATGQVAGTTKEGKPLPPHVRIWDSVSLSTLHVLGLGVFDRAVCCVGFSKS

SEQ ID NO: 282 - protein, 91 aa, Homo sapiens
PLPPHVRIWDSVSLSTLHVLGLGVFDRAVCCVGFSKSNGGNLLCAVDESNDHMLSVWDWAKETKVVDVKAGVQWHNLGSLQPPPPRFQRFS

SEQ ID NO: 283 - protein, 133 aa, Homo sapiens
MFLRGRPVPMMIPDELAPTYSLDTRSELPSCRLKLEWVYGYRGRDCRANLYLLPTGEIVYFVASVAVLYSVEEQRQRHYLGHNDDIKCLAIHPDMVTIATGQVAGTTKEGKPLPPHVRIWDSVSLSTLHVLGL

SEQ ID NO: 284 - protein, 252 aa, Homo sapiens
MKMKLFQTICRQLRSSKFSVESAALVAFSTSSYSCGRKKKVNPYEEVDQEKYSNLVQSVLSSRGVAQTPGSVEEDALLCGPVSKHKLPNQGEDRRVPQNWFPIFNPERSDKPNASDPSVPLKIPLQRNVIPSVTRVLQQTMTKQQVFLLERWKQRMILELGEDGFKEYTSSSMWLNCGGLQRWITCPPTFHGCRALFPVLDQVASSTRRIYGKEKEPEYSETRIFRIGSKLLFGNIQHLLTVWEHILLFTPV

SEQ ID NO: 285 - protein, 264 aa, Homo sapiens
MKMKLFQTICRQLRSSKFSVESAALVAFSTSSYSCGRKKKVNPYEEVDQEKYSNLVQSVLSSRGVAQTPGSVEEDALLCGPVSKHKLPNQDVFLQGKRFHEALESILSPQETLKERDENLLKSGYIESVQHILKDVSGVRALESAVQHETLNYIGLLDCVAEYQGKLCVIDWKTSEKPKPFIQSTFDNPLQVVAYMGAMNHDTNYSFQVQCGLIVVAYKDGSPAHPHFMDAELCSQYWTKWLLRLEEYTEKKKNQNIQKPEYSE

SEQ ID NO: 286 - protein, 344 aa, Homo sapiens
MKMKLFQTICRQLRSSKFSVESAALVAFSTSSYSCGRKKKVNPYEEVDQEKYSNLVQSVLSSRGVAQTPGSVEEDALLCGPVSKHKLPNQGEDRRVPQNWFPIFNPERSDKPNASDPSVPLKIPLQRNVIPSVTRVLQQTMTKQQVFLLERWKQRMILELGEDGFKEYTSNVFLQGKRFHEALESILSPQETLKERDENLLKSGYIESVQHILKDVSGVRALESAVQHETLNYIGLLDCVAEYQGKLCVIDWKTSEKPKPFIQSTFDNPLQVVAYMGAMNHDTNYSFQVQCGLIVVAYKDGSPAHPHFMDAELCSQYWTKWLLRLEEYTEKKKNQNIQKPEYSE

SEQ ID NO: 287 - protein, 355 aa, Homo sapiens
MGPGRCLLTALLLLALAPPPEASQYCGRLEYWNPDNKCCSSCLQRFGPPPCPDYEFRENCGLNDHGDFVTPPFRKCSSGQCNPDGAELCSPCGGGAVTPTPAAGGGRTPWRCRERPVPAKGHCPLTPGNPGAPSSQERSSPASSIAWRTPEPVPQQAWPNFLPLVVLVLLLTLAVIAILLFILLWHLCWPKEKADPYPYPGLVCGVPNTHTPSSSHLSSPGALETGDTWKEASLLPLLSRELSSLASQPLSRLLDELEVLEELIVLLDPEPGPGGGMAHGTTRHLAARYGLPAAWSTFAYSLRPSRSPLRALIEMVVAREPSASLGQLGTHLAQLGRADALRVLSKLGSSGVCWA

SEQ ID NO: 288 - protein, 132 aa, Homo sapiens
MGPGRCLLTALLLLALAPPPEASQYCGRLEYWNPDNKCCSSCLQRFGPPPCPDYEFRENCGLNDHGDFVTPPFRKCSSGQCNPDGAELCSPCGGGAVTPTPAAGGGRTPWRCREAGPCQGALPPHTWKPRRP

SEQ ID NO: 289 - protein, 187 aa, Homo sapiens
MGPGRCLLTALLLLALAPPPEASQYCGRLEYWNPDNKCCSSCLQRFGPPPCPGALETGDTWKEASLLPLLSRELSSLASQPLSRLLDELEVLEELIVLLDPEPGPGGGMAHGTTRHLAARYGLPAAWSTFAYSLRPSRSPLRALIEMVVAREPSASLGQLGTHLAQLGRADALRVLSKLGSSGVCWA

SEQ ID NO: 290 - protein, 138 aa, Homo sapiens
MGPGRCLLTALLLLALAPPPEASQYCGRLEYWNPDNKCCSSCLQRFGPPPCPDYEFRENCGLNDHGDFVTPPFRKCSSGQCNPDGAELCSPCGGGAVTPTPAAGGGRTPWRCRERPVPAKGHCPLTPGNPGAPSSQER

SEQ ID NO: 291 - protein, 74 aa, Homo sapiens
  misc_feature (1)..(1): Xaa can be any naturally occurring amino acid
XNCGLNDHGDFVTPPFRKCSSGQCNPDGAELCSPCGGGAVTPTPAAGGGRTPWRCREAPWRQGTHGRRPHYFHS

SEQ ID NO: 292 - protein, 355 aa, Homo sapiens; identical to SEQ ID NO: 287

SEQ ID NO: 293 - protein, 60 aa, Homo sapiens
  misc_feature (1)..(1): Xaa can be any naturally occurring amino acid
XGRLEYWNPDNKCCSSCLQRFGPPPCPGENPRPSLAWAELAEAGPCQGALPPHTWKPRRP

SEQ ID NO: 294 - protein, 167 aa, Homo sapiens
MGPGRCLLTALLLLALAPPPEASQYCGRLEYWNPDNKCCSSCLQRFGPPPCPELSSLASQPLSRLLDELEVLEELIVLLDPEPGPGGGMAHGTTRHLAARYGLPAAWSTFAYSLRPSRSPLRALIEMVVAREPSASLGQLGTHLAQLGRADALRVLSKLGSSGVCWA

SEQ ID NO: 295 - protein, 1742 aa, Homo sapiens
MAVAELYTQYNRVWIPDPEEVWKSAEIAKDYRVGDKVLRLLLEDGTELDYSVNPESLPPLRNPDILVGENDLTALSYLHEPAVLHNLRIRFAESKLIYTYSGIILVAMNPYKQLPIYGDAIIHAYSGQNMGDMDPHIFAVAEEAYKQMARNNRNQSIIVSGESGAGKTVSARYAMRYFATVSKSGSNAHVEDKVLASNPITEAVGNAKTTRNDNSSRFGKYTEISFDEQNQIIGANMSTYLLEKSRVVFQSENERNYHIFYQLCASAQQSEFKHLKLGSAEEFNYTRMGGNTVIEGVNDRAEMVETQKTFTLLGFKEDFQMDVFKILAAILHLGNVQITAVGNERSSVSEDDSHLKVFCELLGLESGRVAQWLCNRKIVTSSETVVKPMTRPQAVNARDALAKKIYAHLFDFIVERINQALQFSGKQHTFIGVLDIYGFETFDVNSFEQFCINYANEKLQQQFNMHVFKLEQEEYMKEDIPWTLIDFYDNQPVIDLIEAKMGILELLDEECLLPHGTDENWLQKLYNNFVNRNPLFEKPRMSNTSFVIQHFADKVEYKCEGFLEKNRDTVYDMLVEILRASKFHLCANFFQENPTPPSPFGSMITVKSAKQVIKPNSKHFRTTVGSKFRSSLYLLMETLNATTPHYVRCIKPNDEKLPFEFDSKRIVQQLRACGVLETIRISAQSYPSRWTYIEFYSRYGILMTKQELSFSDKKEVCKVVLHRLIQDSNQYQFGKTKIFFRAGQVAYLEKLRLDKLRQSCVMVQKHMRGWLQRKKFLRERRAALIIQQYFRGQQTVRKAITAVALKEAWAAIIIQKHCRGYLVRSLYQLIRMATITMQAYSRGFLARRRYRKMLEEHKAVILQKYARAWLARRRFQSIRRFVLNIQLTYRVQRLQKKLEDQNKENHGLVEKLTSLAALRAGDVEKIQKLEAELEKAATHRRNYEEKGKRYRDAVEEKLAKLQKHNSELETQKEQIQLKLQEKTEELKEKMDNLTKQLFDDVQKEERQRMLLEKSFELKTQDYEKQIQSLKEEIKALKDEKMQLQHLVEGEHVTSDGLKAEVARLSKQVKTISEFEKEIELLQAQKIDVEKHVQSQKREMREKMSEITKQLLESYDIEDVRSRLSVEDLEHLNEDGELWFAYEGLKKATRVLESHFQSQKDCYEKEIEALNFKVVHLSQEINHLQKLFREENDINESIRHEVTRLTSENMMIPDFKQQISELEKQKQDLEIRLNEQAEKMKGKLEELSNQLHRSQEEEGTQRKALEAQNEIHTKEKEKLIDKIQEMQEASDHLKKQFETESEVKCNFRQEASRLTLENRDLEEELDMKDRVIKKLQDQVKTLSKTIGKANDVHSSSGPKEYLGMLQYKREDEAKLIQNLILDLKPRGVVVNMIPGLPAHILFMCVRYADSLNDANMLKSLMNSTINGIKQVVKEHLEDFEMLSFWLSNTCHFLNCLKQYSGEEEFMKHNSPQQNKNCLNNFDLSEYRQILSDVAIRIYHQFIIIMEKNIQPIIVPGMLEYESLQGISGLKPTGFRKRSSSIDDTDGYTMTSVLQQLSYFYTTMCQNGLDPELVRQAVKQLFFLIGAVTLNSLFLRKDMCSCRKGMQIRCNISYLEEWLKDKNLQNSLAKETLEPLSQAAWLLQVKKTTDSDAKEIYERCTSLSAVQIIKILNSYTPIDDFEKRVTPSFVRKVQALLNSREDSSQLMLDTKYLFQVTFPFTPSPHALEMIQIPSSFKLGFLNRL

SEQ ID NO: 296 - protein, 612 aa, Homo sapiens
MAAAGRLPSSWALFSPLLAGLALLGVGPVPARALHNVTAELFGAEAWGTLAAFGDLNSDKQTDLFVLRERNDLIVFLADQNAPYFKPKVKVSFKNHSALITSVVPGDYDGDSQMDVLLTYLPKNYAKSELGAVIFWGQNQTLDPNNMTILNRTFQDEPLIMDFNGDLIPDIFGITNESNQPQILLGGNLSWHPALTTTSKMRIPHSHAFIDLTEDFTADLFLTTLNATTSTFQFEIWENLDGNFSVSTILEKPQNMMVVGQSAFADFDGDGHMDHLLPGCEDKNCQKSTIYLVRSGMKQWVPVLQDFSNKGTLWGFVPFVDEQQPTEIPIPITLHIGDYNMDGYPDALVILKNTSGSNQQAFLLENVPCNNASCEEARRMFKVYWELTDLNQIKDAMVATFFDIYEDGILDIVVLSKGYTKNDFAIHTLKNNFEADAYFVKVIVLSGLCSNDCPRKITPFGVNQPGPYIMYTTVDANGYLKNGSAGQLSQSAHLALQLPYNVLGLGRSANFLDHLYVGIPRPSGEKSIRKQEWTAIIPNSQLIVIPYPHNVPRSWSAKLYLTPSNIVLLTAIALIGVCVFILAIIGILHWQEKKADDREKRQEAHRFHFDAM

SEQ ID NO: 297 - protein, 464 aa, Homo sapiens
MDVLLTYLPKNYAKSELGAVIFWGQNQTLDPNNMTILNRTFQDEPLIMDFNGDLIPDIFGITNESNQPQILLGGNLSWHPALTTTSKMRIPHSHAFIDLTEDFTADLFLTTLNATTSTFQFEIWENLDGNFSVSTILEKPQNMMVVGQSAFADFDGDGHMDHLLPGCEDKNCQKSTIYLVRSGMKQWVPVLQDFSNKGTLWGFVPFVDEQQPTEIPIPITLHIGDYNMDGYPDALVILKNTSGSNQQAFLLENVPCNNASCEEARRMFKVYWELTDLNQIKDAMVATFFDIYEDGILDIVVLSKGYTKNDFAIHTLKNNFEADAYFVKVIVLSGLCSNDCPRKITPFGVNQPGPYIMYTTVDANGYLKNGSAGQLSQSAHLALQLPYNVLGLGRSANFLDHLYVGIPRPSGEKSIRKQEWTAIIPNSQLIVIPYPHNVPRSSHRCLCFHLGNNWHFTLAGKESR

SEQ ID NO: 298 - protein, 74 aa, Homo sapiens
MDVLLTYLPKNYAKSELGAVIFWGQNQTLDPNNMTILNRTFQDEPLIMDFNGDLIPDIFGITNESNQPQILLGG

SEQ ID NO: 299 - protein, 178 aa, Homo sapiens
VLSKGYTKNDFAIHTLKNNFEADAYFVKVIVLSGLCSNDCPRKITPFGVNQPGPYIMYTTVDANGYLKNGSGRSANFLDHLYVGIPRPSGEKSIRKQEWTAIIPNSQLIVIPYPHNVPRSWSAKLYLTPSNIVLLTAIALIGVCVFILAIIGILHWQEKKADDREKRQEAHRFHFDAM

SEQ ID NO: 300 - protein, 113 aa, Homo sapiens
  misc_feature (1)..(1): Xaa can be any naturally occurring amino acid
XKPKVKVSFKNHSALITSVVPGDYDGDSQMDVLLTYLPKNYAKSELGAVIFWGQNQTLDPNNMTILNRTFQDEPLIMDFNGDLIPDIFGITNESNQPQILLGGHTTLNAPHLF

SEQ ID NO: 301 - protein, 431 aa, Homo sapiens
MAEITNIRPSFDVSPVVAGLIGASVLVVCVSVTVFVWSCCHQQAEKKQKNPPYKFIHMLKGISIYPETLSNKKKIIKVRRDKDGPGREGGRRNLLVDAAEAGLLSRDKDPRGPSSGSCIDQLPIKMDYGEELRSPITSLTPGESKTTSPSSPEEDVMLGSLTFSVDYNFPKKALVVTIQEAHGLPVMDDQTQGSDPYIKMTILPDKRHRVKTRVLRKTLDPVFDETFTFYGIPYSQLQDLVLHFLVLSFDRFSRDDVIGEVMVPLAGVDPSTGKVQLTRDIIKRNIQKCISRGELQVSLSYQPVAQRMTVVVLKARHLPKMDITGLSGNPYVKVNVYYGRKRIAKKKTHVKKCTLNPIFNESFIYDIPTDLLPDISIEFLVIDFDRTTKNEVVGRLILGAHSVTASGAEHWREVCESPRKPVAKWHSLSEY

SEQ ID NO: 302 - protein, 513 aa, Homo sapiens
MSSKPEPKDVHQLNGTGPSASPCSSDGPGREPLAGTSEFLGPDGAGVEVVIESRANAKGVREEDALLENGSQSNESDDVSTDRGPAPPSPLKETSFSIGLQVLFPFLLAGFGTVAAGMVLDIVQHWEVFQKVTEVFILVPALLGLKGNLEMTLASRLSTAANIGHMDTPKELWRMITGNMALIQVQATVVGFLASIAAVVFGWIPDGHFSIPHAFLLCASSVATAFIASLVLGMIMIGVIIGSRKIGINPDNVATPIAASLGDLITLALLSGISWGLYLELNHWRYIYPLVCAFFVALLPVWVVLARRSPATREVLYSGWEPVIIAMAISSVGGLILDKTVSDPNFAGMAVFTPVINGVGGNLVAVQASRISTFLHMNGMPGENSEQAPRRCPSPCTTFFSPDVNSRSARVLFLLVVPGHLVFLYTISCMQGGHTTLTLIFIIFYMTAALLQVLILLYIADWMVHWMWGRGLDPDNFSIPYLTALGDLLGTGLLALSFHVLWLIGDRDTDVGD

SEQ ID NO: 303 - protein, 1226 aa, Homo sapiens
MDREERKTINQGQEDEMEIYGYNLSRWKLAIVSLGVICSGGFLLLLLYWMPEWRVKATCVRAAIKDCEVVLLRTTDEFKMWFCAKIRVLSLETYPVSSPKSMSNKLSNGHAVCLIENPTEENRHRISKYSQTESQQIRYFTHHSVKYFWNDTIHNFDFLKGLDEGVSCTSIYEKHSAGLTKGMHAYRKLLYGVNEIAVKVPSVFKLLIKEVLNPFYIFQLFSVILWSTDEYYYYALAIVVMSIVSIVSSLYSIRKQYVMLHDMVATHSTVRVSVCRVNEEIEEIFSTDLVPGDVMVIPLNGTIMPCDAVLINGTCIVNESMLTGESVPVTKTNLPNPSVDVKGIGDELYNPETHKRHTLFCGTTVIQTRFYTGELVKAIVVRTGFSTSKGQLVRSILYPKPTDFKLYRDAYLFLLCLVAVAGIGFIYTIINSILNEVQVGVIIIESLDIITITVPPALPAAMTAGIVYAQRRLKKIGIFCISPQRINICGQLNLVCFDKTGTLTEDGLDLWGIQRVENARFLSPEENVCNEMLVKSQFVACMATCHSLTKIEGVLSGDPLDLKMFEAIGWILEEATEEETALHNRIMPTVVRPPKQLLPESTPAGNQEMELFELPATYEIGIVRQFPFSSALQRMSVVARVLGDRKMDAYMKGAPEAIAGLCKPETVPVDFQNVLEDFTKQGFRVIALAHRKLESKLTWHKVQNISRDAIENNMDFMGLIIMQNKLKQETPAVLEDLHKANIRTVMVTGDSMLTAVSVARDCGMILPQDKVIIAEALPPKDGKVAKINWHYADSLTQCSHPSAIDPEAIPVKLVHDSLEDLQMTRYHFAMNGKSFSVILEHFQDLVPKLMLHGTVFARMAPDQKTQLIEALQNVDYFVGMCGDGANDCGALKRAHGGISLSELEASVASPFTSKTPSISCVPNLIREGRAALITSFCVFKFMALYSIIQYFSVTLLYSILSNLGDFQFLFIDLAIILVVVFTMSLNPAWKELVAQRPPSGLISGALLFSVLSQIIICIGFQSLGFFWVKQQPWYEVWHPKSDACNTTGSGFWNSSHVDNETELDEHNIQNYENTTVFFISSFQYLIVAIAFSKGKPFRQPCYKNYFFVFSVIFLYIFILFIMLYPVASVDQVLQIVCVPYQWRVTMLIIVLVNAFVSITVEESVDRWGKCCLPWALGCRKKTPKAKYMYLAQELLVDPEWPPKPQTTTEAKALVKENGSCQIITIT

SEQ ID NO: 304 - protein, 162 aa, Homo sapiens
  misc_feature (1)..(1): Xaa can be any naturally occurring amino acid
XPFRQPCYKNYFFVFSVIFLYIFILFIMLYPVASVDQVLQIVCVPYQWRVTMLIIVLVNAFVSITVENFFLDMVLWKVVFNRDKQGEYRFSTTQPPQESVDRWGKCCLPWALGCRKKTPKAKYMYLAQELLVDPEWPPKPQTTTEAKALVKENGSCQIITIT

SEQ ID NO: 305 - protein, 1226 aa, Homo sapiens; identical to SEQ ID NO: 303

SEQ ID NO: 306 - protein, 47 aa, Homo sapiens
MDREERKTINQGQEDEMEIYGYNLSRWKLAIVSLGVICSGGFLLLLL

SEQ ID NO: 307 - protein, 103 aa, Homo sapiens
MDREERKTINQGQEDEMEIYGYNLSRWKLAIVSLGVICSGGFLLLLLYWMPEWRVKATCVRAAIKDCEVVLLRTTDEFKMWFCAKIRVLSLETYPVSSPKSMS

SEQ ID NO: 308 - protein, 701 aa, Homo sapiens
ISEIEEIFSTDLVPGDVMVIPLNGTIMPCDAVLINGTCIVNESMLTGESVPVTKTNLPNPSVDVKGIGDELYNPETHKRHTLFCGTTVIQTRFYTGELVKAIVVRTGFSTSKGQLVRSILYPKPTDFKLYRDAYLFLLCLVAVAGIGFIYTIINSILNEVQVGVIIIESLDIITITVPPALPAAMTAGIVYAQRRLKKIGIFCISPQRINICGQLNLVCFDKTGTLTEDGLDLWGIQRVENARFLSPEENVCNEMLVKSQFVACMATCHSLTKIEGVLSGDPLDLKMFEAIGWILEEATEEETALHNRIMPTVVRPPKQLLPESTPAGNQEMELFELPATYEIGIVRQFPFSSALQRMSVVARVLGDRKMDAYMKGAPEAIAGLCKPETVPVDFQNVLEDFTKQGFRVIALAHRKLESKLTWHKVQNISRDAIENNMDFMGLIIMQNKLKQETPAVLEDLHKANIRTVMVTGDSMLTAVSVARDCGMILPQDKVIIAEALPPKDGKVAKINWHYADSLTQCSHPSAIDPEAIPVKLVHDSLEDLQMTRYHFAMNGKSFSVILEHFQDLVPKLMLHGTVFARMAPDQKTQLIEALQNVDYFVGMCGDGANDCGALKRAHGGISLSELEASVASPFTSKTPSISCVPNLIREGRAALITSFCELALFSIVTYSLDHFIISILISNMLVLFFSDFHNCAFYSLV

SEQ ID NO: 309 - protein, 976 aa, Homo sapiens
MGENEDEKQAQAGQVFENFVQASTCKGTLQAFNILTRHLDLDPLDHRNFYSKLKSKVTTWKAKALWYKLDKRGSHKEYKRGKSCTNTKCLIVGGGPCGLRTAIELAYLGAKVVVVEKRDSFSRNNVLHLWPFTIHDLRGLGAKKFYGKFCAGSIDHISIRQLQLILFKVALMLGVEIHVNVEFVKVLEPPEDQENQKIGWRAEFLPTDHSLSEFEFDVIIGADGRRNTLEGFRRKEFRGKLAIAITANFINRNSTAEAKVEEISGVAFIFNQKFFQDLKEETGIDLENIVYYKDCTHYFVMTAKKQSLLDKGVIINDYIDTEMLLCAENVNQDNLLSYAREAADFATNYQLPSLDFAMNHYGQPDVAMFDFTCMYASENAALVRERQAHQLLVALVGDSLLEPFWPMGTGCARGFLAAFDTAWMVKSWNQGTPPLELLAERESLYRLLPQTTPENINKNFEQYTLDPGTRYPNLNSHCVRPHQVKHLYITKELEHYPLERLGSVRRSVNLSRKESDIRPSKLLTWCQQQTEGYQHVNVTDLTTSWRSGLALCAIIHRFRPELINFDSLNEDDAVENNQLAFDVAEREFGIPPVTTGKEMASAQEPDKLSMVMYLSKFYELFRGTPLRPVDSWRKNYGENADLSLAKSSISNNYLNLTFPRKRTPRVDGQTGENDMNKRRRKGFTNLDEPSNFSSRSLGSNQECGSSKEGGNQNKVKSMANQLLAKFEESTRNPSLMKQEKKSPSGFHFHPSHLRTVHPQESMRKSFPLNLGGSDTCYFCKKRVYVMERLSAEGHFFHRECFRCSICATTLRLAAYTFDCDEGKFYCKPHFIHCKTNSKQRKRRAELKQQREEEATWQEQEAPRRDTPTESSCAVAAIGTLEGSPPGISTSFFRKVLGWPLRLPRDLCNWMQGLLQAAGLHIRDNAYNYCYMYELLSLGLPLLWAFSEVLAAMYRESEGSLESICNWVLRCFPVKLR

SEQ ID NO: 310 - protein, 633 aa, Homo sapiens
MAAAAAAATTAACSSGSAGTDAAGASGLQQPPPQPQPQPAAAAPAQPPPEPPRKPRMDPRRRQAALSFLTNISLDGRLPPQDAEWGGGEEGGAAKPGAGGACGARTRFSLLAAAERGGCIALAAPGTPAAGLAAGSGPCLPQPSSLPPLIPGGHATVSGPGVARGFASPLGAGRASGEQWQPPRPAPLAACAQLQLLDGSGAAGQEELEEDDAFISVQVPAAAFLGSGTPGSGSGSRGRLNSFTQGILPIAFSRPTSQNYCSLEQPGQGGSTSAFEQLQRSRRRLISQRSSLETLEDIEENAPLRRCRTLSGSPRPKNFKKIHFIKNMRQHDTRNGRIVLISGRRSFCSIFSVLPYRDSTQVGDLKLDGGRQSTGAVSLKEIIGLEGVELGADGKTVSYTQFLLPTNAFGARRNTIDSTSSFSQFRNLSHRSLSIGRASGTQGSLDTGSDLGDFMDYDPNLLDDPQWPCGKHKRVLIFPSYMTTVIDYVKPSDLKKDMNETFKEKFPHIKLTLSKIRSLKREMRKLAQEDCGLEEPTVAMAFVYFEKLALKGKLNKQNRKLCAGACVLLAAKIGSDLKKHEVKHLIDKLEEKFRLNRRELIAFEFPVLVALEFALHLPEHEVMPHYRRLVQSS

SEQ ID NO: 311 - protein, 38 aa, Homo sapiens
MRQHDTRNGRIVLISGRRSFCSIFSVLPYRDSTQVGQQ

SEQ ID NO: 312 - protein, 301 aa, Homo sapiens
MFSHLPFDCVLLLLLLLLTRSSEVEYRAEVGQNAYLPCFYTPAAPGNLVPVCWGKGACPVFECGNVVLRTDERDVNYWTSRYWLNGDFRKGDVSLTIENVTLADSGIYCCRIQIPGIMNDEKFNLKLVIKPAKVTPAPTRQRDFTAAFPRMLTTRGHGPAETQTLGSLPDINLTQISTLANELRDSRLANDLRDSGATIRIGIYIGAGICAGLALALIFGALIFKWYSHSKEKIQNLSLISLANLPPSGLANAVAEGIRSEENIYTIEENVYEVEEPNEYYCYVSSRQQPSQPLGCRFAMP

SEQ ID NO: 313 - protein, 273 aa, Homo sapiens
MFSHLPFDCVLLLLLLLLTRSSEVEYRAEVGQNAYLPCFYTPAAPGNLVPVCWGKGACPVFECGNVVLRTDERDVNYWTSRYWLNGDFRKGDVSLTIENVTLADSGIYCCRIQIPGIMNDEKFNLKLVIKPAETQTLGSLPDINLTQISTLANELRDSRLANDLRDSGATIRIGIYIGAGICAGLALALIFGALIFKWYSHSKEKIQNLSLISLANLPPSGLANAVAEGIRSEENIYTIEENVYEVEEPNEYYCYVSSRQQPSQPLGCRFAMP

SEQ ID NO: 314 - protein, 116 aa, Homo sapiens
MQLSFWSHCRCFCMFSIPLLMCRVRDQICDCPECTLQENPFFSQPGAPILQCMGCCFSRAYPTPLRSKKTMLVQKNVTSESTCCVAKSYNRVTVMGGFKVENHTACHCSTCYYHKS

SEQ ID NO: 315 - protein, 147 aa, Homo sapiens
MDYYRKYAAIFLVTLSVFLHVLHSAPDVQETGFHHVAQAALKLLSSSNPPTKASQSARITDCPECTLQENPFFSQPGAPILQCMGCCFSRAYPTPLRSKKTMLVQKNVTSESTCCVAKSYNRVTVMGGFKVENHTACHCSTCYYHKS

SEQ ID NO: 316 - protein, 62 aa, Homo sapiens
MDYYRKYAAIFLVTLSVFLHVLHSAPDVQDCPECTLQENPFFSQPGAPILQCMGCCFSRAYP

SEQ ID NO: 317 - protein, 116 aa, Homo sapiens
MDYYRKYAAIFLVTLSVFLHVLHSAPDVQDCPECTLQENPFFSQPGAPILQCMGCCFSRAYPTPLRSKKTMLVQKNVTSESTCCVAKSYNRVTVMGGFKVENHTACHCSTCYYHKS

SEQ ID NO: 318 - protein, 101 aa, Homo sapiens
MDYYRKYAAIFLVTLSVFLHVLHSAPDVQDCPECTLQENPFFSQPGAPILQCMGCCFSRAYPTPLRSKKTMLVQKNVTSESTCCVAKSYNRVRTSRSPEAF

SEQ ID NO: 319 - protein, 316 aa, Homo sapiens
MTQGKLSVANKAPGTEGQQQVHGEKKEAPAVPSAPPSYEEATSGEGMKAGAFPPAPTAVPLHPSWAYVDPSSSSSYDNGFPTGDHELFTTFSWDDQKVRRVFVRKVYTILLIQLLVTLAVVALFTFCDPVKDYVQANPGWYWASYAVFFATYLTLACCSGPRRHFPWNLILLTVFTLSMAYLTGMLSSYYNTTSVLLCLGITALVCLSVTVFSFQTKFDFTSCQGVLFVLLMTLFFSGLILAILLPFQYVPWLHAVYAALGAGVFTLFLALDTQLLMGNRRHSLSPEEYIFGALNIYLDIIYIFTFFLQLFGTNRE

SEQ ID NO: 320 - protein, 111 aa, Homo sapiens
MKAGAFPPAPTAVPLHPSWAYVDPSSSSSYDNGFPTGDHELFTTFSWDDQKVRRVFVRKVYTILLIQLLVTLAVVALFTFCDPVKDYVQANPGWYWASYAVFFATYLTLAC

SEQ ID NO: 321 - protein, 208 aa, Homo sapiens
MTQGKLSVANKAPGTEGQQQVHGEKKEAPAVPSAPPSYEEATSGEGMKAGAFPPAPTAVPLHPSWAYVDPSSSSSYDNGFPTGDHELFTTFSWDDQKVRRVFVRKNPSHPQVYTILLIQLLVTLAVVALFTFCDPVKDYVQANPGWYWASYAVFFATYLTLACCSGPRRHFPWNLILLTVFTLSMAYLTGMLSSSTSPPARACSSCFS

SEQ ID NO: 322 - protein, 248 aa, Homo sapiens
MTQGKLSVANKAPGTEGQQQVHGEKKEAPAVPSAPPSYEEATSGEGMKAGAFPPAPTAVPLHPSWAYVDPSSSSSYDNGFPTGDHELFTTFSWDDQKVRRVFVRKVYTILLIQLLVTLAVVALFTFCDPVKDYVQANPGWYWASYAVFFATYLTLACCSGPRRHFPWNLILLTVFTLSMAYLTGMLSSYYNTTSVLLCLGITALVCLSVTVFSFQTKFDFTSCQGVLFVLLMTLFFSGLILAILLPFQ

SEQ ID NO: 323 - protein, 270 aa, Homo sapiens
MKAGAFPPAPTAVPLHPSWAYVDPSSSSSYDNGFPTGDHELFTTFSWDDQKVRRVFVRKVYTILLIQLLVTLAVVALFTFCDPVKDYVQANPGWYWASYAVFFATYLTLACCSGPRRHFPWNLILLTVFTLSMAYLTGMLSSYYNTTSVLLCLGITALVCLSVTVFSFQTKFDFTSCQGVLFVLLMTLFFSGLILAILLPFQYVPWLHAVYAALGAGVFTLFLALDTQLLMGNRRHSLSPEEYIFGALNIYLDIIYIFTFFLQLFGTNRE

SEQ ID NO: 324 - protein, 266 aa, Homo sapiens
MVYTSHYKSPGRRPLKTHPTVTYWRVNEGSSSSYDNGFPTGDHELFTTFSWDDQKVRRVFVRKVYTILLIQLLVTLAVVALFTFCDPVKDYVQANPGWYWASYAVFFATYLTLACCSGPRRHFPWNLILLTVFTLSMAYLTGMLSSYYNTTSVLLCLGITALVCLSVTVFSFQTKFDFTSCQGVLFVLLMTLFFSGLILAILLPFQYVPWLHAVYAALGAGVFTLFLALDTQLLMGNRRHSLSPEEYIFGALNIYLDIIYIFTFFL

SEQ ID NO: 325 - protein, 145 aa, Homo sapiens
  misc_feature (1)..(1): Xaa can be any naturally occurring amino acid
XYVQANPGWYWASYAVFFATYLTLACCSGPRRHFPWNLILLTVFTLSMAYLTGMLSSYYNTTSVLLCLGITALVCLSVTVFSFQTKFDFTSCQGVLFVLLMTLFFSGLILAILLPFQYFLALDTQLLMGNRRHSLSPEEYIFGAL

SEQ ID NO: 326 - protein, 695 aa, Homo sapiens
  misc_feature (1)..(1): Xaa can be any naturally occurring amino acid
XEGGQGPRGLGTVPWLRDLPGSENHMPWEEPAGEKPSCSHSQKAFHMEPAQKPCFTTDMVTWALLCISAETVRGEAPSQPRGIPHRSPVSVDDLWLEKTQRKKLQKQAHVERRLHIGAVHKDGVKCWRKTIITSPESLNLPRRSHPLSQSAPTGLNHMGWPEHTPGTAMPDGALDTAVCADEVGSEEDLYDDLHSSSHHYSHPGGGGEQLAINELISDGSVVCAEALWDHVTMDDQELGFKAGDVIEVMDATNREWWWGRVADGEGWFPASFVRLRVNQDEPADDDAPLAGNSGAEDGGAEAQSSKDQMRTNVINEILSTERDYIKHLRDICEGYVRQCRKRADMFSEEQLRTIFGNIEDIYRCQKAFVKALEQRFNRERPHLSELGACFLEHQADFQIYSEYCNNHPNACVELSRLTKLSKYVYFFEACRLLQKMIDISLDGFLLTPVQKICKYPLQLAELLKYTHPQHRDFKDVEAALHAMKNVAQLINERKRRLENIDKIAQWQSSIEDWEGEDLLVRSSELIYSGELTRVTQPQAKSQQRMFFLFDHQLIYCKKDLLRRDVLYYKGRLDMDGLEVVDLEDGKDRDLHVSIKNAFRLHRGATGDSHLLCTRKPEQKQRWLKAFAREREQVQLDQETGFSITELQRKQAMLNASKQQVTGKPKGRRTAAPPPRLPGPYPADIIPFSEPQSQAS

SEQ ID NO: 327 - protein, 573 aa, Homo sapiens
MTNSKGRSITDKTSGGPSSGGGFVDWTLRLNTIQSDKFLNLLLSMVPVIYQKNQEDRHKKANGIWQDGLSTAVQTFSNRSEQHMEYHSFSEQSFHANNGHASSSCSQKYDDYANYNYCDGRETSETTAMLQDEDISSDGDEDAIVEVTPKLPKESSGIMALQILVPFLLAGFGTVSAGMVLDIVQHWEVFRKVTEVFILVPALLGLKGNLEMTLASRLSTAVNIGKMDSPIEKWNLIIGNLALKQVQATVVGFLAAVAAIILGWIPEGKYYLDHSILLCSSSVATAFIASLLQGIIMVGVIVGSKKTGINPDNVATPIAASFGDLITLAILAWISQGLYSCLETYYYISPLVGVFFLALTPIWIIIAAKHPATRTVLHSGWEPVITAMVISSIGGLILDTTVSDPNLVGIVVYTPVINGIGGNLVAIQASRISTYLHLHSIPGELPDEPKGCYYPFRTFFGPGVNNKSAQVLLLLVIPGHLIFLYTIHLMKSGHTSLTIIFIVVYLFGAVLQVFTLLWIADWMVHHFWRKGKDPDSFSIPYLTALGDLLGTALLALSFHFLWLIGDRDGDVGD

SEQ ID NO: 328 - protein, 149 aa, Homo sapiens
  misc_feature (1)..(1): Xaa can be any naturally occurring amino acid
XDDYANYNYCDGRETSETTAMLQDEDISSDGDEDAIVEVTPKLPKESSGIMALQILVPFLLAGFGTVSAGMVLDIVQVNIGKMDSPIEKWNLIIGNLALKQVQATVVGFLAAVAAIILGWIPEGKYYLDHSILLCSSSVATAFIASLLQ

SEQ ID NO: 329 - protein, 68 aa, Homo sapiens
  misc_feature (1)..(1): Xaa can be any naturally occurring amino acid
XLKALKGYIKHEARKGNENQDSSTSKRKTLCGFYSHQPTTLARPVLWPCKSEYLGSEGVTQALCYLCS

SEQ ID NO: 330 - protein, 76 aa, Homo sapiens
MIIPSLEELDSLKYSDLQNLAKSLGLRANLRATKLLKALKGYIKHEARKGNENQFHSCCPGWSAMTRSRLTATSTS

SEQ ID NO: 331 - protein, 748 aa, Homo sapiens
MVLLRVLILLLSWAAGMGGQYGNPLNKYIRHYEGLSYNVDSLHQKHQRAKRAVSHEDQFLRLDFHAHGRHFNLRMKRDTSLFSDEFKVETSNKVLDYDTSHIYTGHIYGEEGSFSHGSVIDGRFEGFIQTRGGTFYVEPAERYIKDRTLPFHSVIYHEDDINYPHKYGPQGGCADHSVFERMRKYQMTGVEEVTQIPQEEHAANGPELLRKKRTTSAEKNTCQLYIQTDHLFFKYYGTREAVIAQISSHVKAIDTIYQTTDFSGIRNISFMVKRIRINTTADEKDPTNPFRFPNIGVEKFLELNSEQNHDDYCLAYVFTDRDFDDGVLGLAWVGAPSGSSGGICEKSKLYSDGKKKSLNTGIITVQNYGSHVPPKVSHITFAHEVGHNFGSPHDSGTECTPGESKNLGQKENGNYIMYARATSGDKLNNNKFSLCSIRNISQVLEKKRNNCFVESGQPICGNGMVEQGEECDCGYSDQCKDECCFDANQPEGRKCKLKPGKQCSPSQGPCCTAQCAFKSKSEKCRDDSDCAREGICNGFTALCPASDPKPNFTDCNRHTQVCINGQCAGSICEKYGLEECTCASSDGKDDKELCHVCCMKKMDPSTCASTGSVQWSRHFSGRTITLQPGSPCNDFRGYCDVFMRCRLVDADGPLARLKKAIFSPELYENIAEWIVAHWWAVLLMGIALIMLMAGFIKICSVHTPSSNPKLPPPKPLPGTLKRRRPPQPIQQPQRQRPRESYQMGHMRR

SEQ ID NO: 332 - protein, 58 aa, Homo sapiens
  misc_feature (1)..(1): Xaa can be any naturally occurring amino acid
XEEGSFSHGSVIDGRFEGFIQTRGGTFYVEPAERYIKDRTLPFHSVIYHEDDISEGLN

SEQ ID NO: 333 - protein, 71 aa, Homo sapiens
MVLLRVLILLLSWAAGMGDRDFDDGVLGLAWVGAPSGSSGGICEKSKLYSDVPTMGKLHSKEKPIKSSSPN

SEQ ID NO: 334 - protein, 125 aa, Homo sapiens
MVLLRVLILLLSWAAGMGGQYGNPLNKYIRHYEGLSYNVDSLHQKHQRAKRAVSHEDQFLRLDFHAHGRHFNLRMKRDTSLFSDEFKVETSNKVLDYDTSHIYTGHIYDYPHKYGPQGGCADHSV

SEQ ID NO: 335 - protein, 59 aa, Homo sapiens
MVLLRVLILLLSWAAGMGAPARWRIPKSSPPPRPAAQTRGKLCCLQLGSCIVLYPARRS

SEQ ID NO: 336 - protein, 115 aa, Homo sapiens
MVLLRVLILLLSWAAGMGGQYGNPLNKYIRHYEGLSYNVDSLHQKHQRAKRAVSHEDQFLRLDFHAHGRDGVLPCCPGWSQTPGLKRSTCLSLPQCWDYRCEPSPMISVFDYPHK

SEQ ID NO: 337 - protein, 148 aa, Homo sapiens
MVLLRVLILLLSWAAGMGDRDFDDGVLGLAWVGAPSGSSGGICEKSKLYSDGKKKSLNTGIITVQNYGSHVPPKVSHITFAHEVGHNFGSPHDSGTECTPGESKNLGQKENGNYIMYARATSGDKLNNNKFSLCSIRNISQVLEKKRN

SEQ ID NO: 338 - protein, 38 aa, Homo sapiens
MVLLRVLILLLSWAAGMGVPTMGKLHSKEKPIKSSSPN

SEQ ID NO: 339 - protein, 452 aa, Homo sapiens
MTLVSGWLLYGWIIAVQTKTKKTLAKPNIRNVVVVDGVRTPFLLSGTSYKDLMPHDLARAALTGLLHRTSVPKEVVDYIIFGTVIQEVKTSNVAREAALGAGFSDKTPAHTVTMACISANQAMTTGVGLIASGQCDVIVAGGVELMSDVPIRHSRKMRKLMLDLNKAKSMGQRLSLISKFRFNFLAPELPAVSEFSTSETMGHSADRLAAAFAVSRLEQDEYALRSHSLAKKAQDEGLLSDVVPFKVPGKDTVTKDNGIRPSSLEQMAKLKPAFIKPYGTVTAANSSFLTDGASAMLIMAEEKALAMGYKPKAYLRDFMYVSQDPKDQLLLGPTYATPKVLEKAGLTMNDIDAFEFHEAFSGQILANFKAMDSDWFAENYMGRKTKVGLPPLEKFNNWGGSLSLGHPFGATGCRLVMAAANRLRKEGGQYGLVAACAAGGQGHAMIVEAYPK

SEQ ID NO: 340 - protein, 260 aa, Homo sapiens
MARPHPWWLCVLGTLVGLSATPAPKSCPERHYWAQGKLCCQMCEPGTFLVKDCDQHRKAAQCDPCIPGVSFSPDHHTRPHCESCRHCNSGLLVRNCTITANAECACRNGWQCRDKECTECDPLPNPSLTARSSQALSPHPQPTHLPYVSEMLEARTAGHMQTLADFRQLPARTLSTHWPPQRSLCSSDFIRILVIFSGMFLVFTLAGALFLHQRRKYRSNKGESPVEPAEPCHYSCPREEEGSTIPIQEDYRKPEPACSP

SEQ ID NO: 341 - protein, 819 aa, Homo sapiens
MWGLVRLLLAWLGGWGCMGRLAAPARAWAGSREHPGPALLRTRRSWVWNQFFVIEEYAGPEPVLIGKLHSDVDRGEGRTKYLLTGEGAGTVFVIDEATGNIHVTKSLDREEKAQYVLLAQAVDRASNRPLEPPSEFIIKVQDINDNPPIFPLGPYHATVPEMSNVGTSVIQVTAHDADDPSYGNSAKLVYTVLDGLPFFSVDPQTGVVRTAIPNMDRETQEEFLVVIQAKDMGGHMGGLSGSTTVTVTLSDVNDNPPKFPQSLYQFSVVETAGPGTLVGRLRAQDPDLGDNALMAYSILDGEGSEAFSISTDLQGRDGLLTVRKPLDFESQRSYSFRVEATNTLIDPAYLRRGPFKDVASVRVAVQDAPEPPAFTQAAYHLTVPENKAPGTLVGQISAADLDSPASPIRYSILPHSDPERCFSIQPEEGTIHTAAPLDREARAWHNLTVLATELGWSWGPERGWVPLLVAEWSAPAAPPQRSPVGSAVGIPQDSSAQASRVQVAIQTLDENDNAPQLAEPYDTFVCDSAAPGQLIQVIRALDRDEVGNSSHVSFQGPLGPDANFTVQDNRDGSASLLLPSRPAPPRHAPYLVPIELWDWGQPALSSTATVTVSVCRCQPDGSVASCWPEAHLSAAGLSTGALLAIITCVGALLALVVLFVALRRQKQEALMVLEEEDVRENIITYDDEGGGEEDTEAFDITALQNPDGAAPPAPGPPARRDVLPRARVSRQPRPPGPADVAQLLALRLREADEDPGVPPYDSVQVYGYEGRGSSCGSLSSLGSGSEAGGAPGPAEPLDDWGPLFRTLAELYGAKEPPAP

SEQ ID NO: 342 - protein, 819 aa, Homo sapiens; identical to SEQ ID NO: 341

SEQ ID NO: 343 - protein, 781 aa, Homo sapiens
MWGLVRLLLAWLGGWGCMGRLAAPARAWAGSREHPGPALLRTRRSWVWNQFFVIEEYAGPEPVLIGKLHSDVDRGEGRTKYLLTGEGAGTVFVIDEATGNIHVTKSLDREEKAQYVLLAQAVDRASNRPLEPPSEFIIKVQDINDNPPIFPLGPYHATVPEMSNVGTSVIQVTAHDADDPSYGNSAKLVYTVLDGLPFFSVDPQTGVVRTAIPNMDRETQEEFLVVIQAKDMGGHMGGLSGSTTVTVTLSDVNDNPPKFPQSLYQFSVVETAGPGTLVGRLRAQDPDLGDNALMAYSILDGEGSEAFSISTDLQGRDGLLTVRKPLDFESQRSYSFRVEATNTLIDPAYLRRGPFKDVASVRVAVQDAPEPPAFTQAAYHLTVPENKAPGTLVGQISAADLDSPASPIRYSILPHSDPERCFSIQPEEGTIHTAAPLDREARAWHNLTVLATELDSSAQASRVQVAIQTLDENDNAPQLAEPYDTFVCDSAAPGQLIQVIRALDRDEVGNSSHVSFQGPLGPDANFTVQDNRDGSASLLLPSRPAPPRHAPYLVPIELWDWGQPALSSTATVTVSVCRCQPDGSVASCWPEAHLSAAGLSTGALLAIITCVGALLALVVLFVALRRQKQEALMVLEEEDVRENIITYDDEGGGEEDTEAFDITALQNPDGAAPPAPGPPARRDVLPRARVSRQPRPPGPADVAQLLALRLREADEDPGVPPYDSVQVYGYEGRGSSCGSLSSLGSGSEAGGAPGPAEPLDDWGPLFRTLAELYGAKEPPAP

SEQ ID NO: 344 - protein, 781 aa, Homo sapiens; identical to SEQ ID NO: 343

SEQ ID NO: 345 - protein, 314 aa, Homo sapiens
MWGLVRLLLAWLGGWGCMGRLAAPARAWAGSREHPGPALLRTRRSWVWNQFFVIEEYAGPEPVLIGKLHSDVDRGEGRTKYLLTGEGAGTVFVIDEATGNIHVTKSLDREEKAQYVLLAQAVDRASNRPLEPPSEFIIKIITCVGALLALVVLFVALRRQKQEALMVLEEEDVRENIITYDDEGGGEEDTEAFDITALQNPDGAAPPAPGPPARRDVLPRARVSRQPRPPGPADVAQLLALRLREADEDPGVPPYDSVQVYGYEGRGSSCGSLSSLGSGSEAGGAPGPAEPLDDWGPLFRTLAELYGAKEPPAP

SEQ ID NO: 346 - protein, 45 aa, Homo sapiens
MFRAAAPGQLRRARRGFPMLPRLVSNSCPQVIHLPRPPKVLELQA

SEQ ID NO: 347 - protein, 45 aa, Homo sapiens; identical to SEQ ID NO: 346

SEQ ID NO: 348 - protein, 46 aa, Homo sapiens
MNEAKVKETLRRCGASGDECGRLQYALTCLRKVTGLGGEHKEDSSW

SEQ ID NO: 349 - protein, 248 aa, Homo sapiens
MQTCPLAFPGHVSQALGTLLFLAASLSAQNEGWDSPICTEGVVSVSWGENTVMSCNISNAFSHVNIKLRAHGQESAIFNEVAPGYFSRDGWQLQVQGGVAQLVIKGARDSHAGLYMWHLVGHQRNNRQVTLEVSGAEPQSAPDTGFWPVPAVVTAVFILLVALVMFAWYRCRCSQQRREKKFFLLEPQMKVAALRAGAQQGLSRASAELWTPDSEPTPRPLALVFKPSPLGALELLSPQPLFPYAADP

SEQ ID NO: 350 - protein, 149 aa, Homo sapiens
MQTCPLAFPGHVSQALGTLLFLAASLSAQNEGWDSPICTEGVVSVSWGENTVMSCNISNAFSHVNIKLRAHGQESAIFNEVAPGYFSRDGWQLQVQGGVAQLVIKGARDSHAGLYMWHLVGHQRNNRQVTLEVSGAAVPSNAGRRSSSS

SEQ ID NO: 351 - protein, 178 aa, Homo sapiens
MQTCPLAFPGHVSQALGTLLFLAASLSAQNEGWDSPICTEGVVSVSWGENTVMSCNISNAFSHVNIKLRAHGQESAIFNEVAPGYFSRDGWQLQVQGGVAQLVIKGARDSHAGLYMWHLVGHQRNNRQVTLEVSGAEPQSAPDTGFWPVPAVVTAVFILLVALVMFAWYRCRCSQQRR

SEQ ID NO: 352 - protein, 43 aa, Homo sapiens
MQTCPLAFPGHVSQALGTLLFLAASLSAQNEAACPRAGERHLQ

SEQ ID NO: 353 - protein, 44 aa, Homo sapiens
MQTCPLAFPGHVSQALGTLLFLAASLSAQNEGWDSPICTEGVVS

SEQ ID NO: 354 - protein, 85 aa, Homo sapiens
MQTCPLAFPGHVSQALGTLLFLAASLSAQNEGWDSPICTEGVVSVSWGENTVMSCNISNAFSHVNIKLRAHGQESAIFNEVAPGY

SEQ ID NO: 355 - protein, 170 aa, Homo sapiens
MQTCPLAFPGHVSQALGTLLFLAASLSAQNEGWDSPICTEGVVSVSWGENTVMSCNISNAFSHVNIKLRAHGQESAIFNEVAPGYFSRDGWQLQVQGGVAQLVIKGARDSHAGLYMWHLVGHQRNNRQVTLEVSEPRGLKDRASAQLLGPGTSRGAEPQSAPDTGFWPVP

SEQ ID NO: 356 - protein, 147 aa, Homo sapiens
MQTCPLAFPGHVSQALGTLLFLAASLSAQNEGWDSPICTEGVVSVSWGENTVMSCNISNAFSHVNIKLRAHGQESAIFNEVAPGYFSRDGWQLQVQGGVAQLVIKGARDSHAGLYMWHLVGHQRNNRQVTLEVSEPRGLKDRASAQL

SEQ ID NO: 357 - protein, 165 aa, Homo sapiens
MDAPRRDMELLSNSLAAYAHIRANPESFGLYFVLGVCFGLLLTLCLLVISISWAPRPRPRGPAQRRDPRSSTLEPEDDDEDEEDTVTRLGPDDTLPGPELSAEPDGPLNVNVFTSAEELERAQRLEERERILREIWRTGQPDLLGTGTLGPSPTATGTLGRMHYY

SEQ ID NO: 358 - protein, 639 aa, Homo sapiens
MNLEKLSKPELLTLFSILEGELEARDLVIEALKAQHRDTFIEERYGKYNISDPLMALQRDFETLKEKNDGEKQPVCTNPLSILKVVMKQCKNMQERMLSQLAAAESRHRKVILDLEEERQRHAQDTAEGDDVTYMLEKERERLTQQLEFEKSQVKKFEKEQKKLSSQLEEERSRHKQLSSMLVLECKKATNKAAEEGQKAGELSLKLEKEKSRVSKLEEELAAERKRGLQTEAQVEKQLSEFDIEREQLRAKLNREENRTKTLKEEMESLKKIVKDLEASHQHSSPNEQLKKPVTVSKGTATEPLMLMSVFCQTESFPAERTHGSNIAKMTNTGLPGPATPAYSYAKTNGHCDPEIQTTRELTAGNNVENQVPPREKSVALAQEKPVENGGCPVGIETPVPMPSPLSSSGSSLSPSSTASSSLTSSPCSSPVLTKRLLGSSASSPGYQSSYQVGINQRFHAARHKFQSQADQDQQASGLQSPPSRDLSPTLIDNSAAKQLARNTVTQVLSRFTSQQGPIKPVSPNSSPFGTDYRNLANTANPRGDTSHSPTPGKVSSPLSPLSPGIKSPTIPRAERGNPPPIPPKKPGLTPSPSATTPLTKTHSQAASLTTAEDLASSCSSNTVVANGKDVELLLPTSS

SEQ ID NO: 359 - protein, 271 aa, Homo sapiens
MNLEKLSKPELLTLFSILEGELEARDLVIEALKAQHRDTFIEERYGKYNISDPLMALQRDFETLKEKNDGEKQPVCTNPLSILKVVMKQCKNMQERMLSQLAAAESRHRKVILDLEEERQRHAQDTAEGDDVTYMLEKERERLTQQLEFEKSQVKKFEKEQKKLSSQLEEERSRHKQLSSMLVLECKKATNKAAEEGQKAGELSLKLEKEKSRVSKLEEELAAERKRGLQTEAQVEKQLSEFDIEREQLRAKLNREENRTKTLKEEMESLK

SEQ ID NO: 360 - protein, 396 aa, Homo sapiens
MSATDRMGPRAVPGLRLALLLLLVLGTPKSGVQGQEGLDFPEYDGVDRVINVNAKNYKNVFKKYEVLALLYHEPPEDDKASQRQFEMEELILELAAQVLEDKGVGFGLVDSEKDAAVAKKLGLTEVDSMYVFKGDEVIEYDGEFSADTIVEFLLDVLEDPVELIEGERELQAFENIEDEIKLIGYFKSKDSEHYKAFEDAAEEFHPYIPFFATFDSKVAKKLTLKLNEIDFYEAFMEEPVTIPDKPNSEEEIVNFVEEHRRSTLRKLKPESMYETWEDDMDGIHIVAFAEEADPDGFEFLETLKAVAQDNTENPDLSIIWIDPDDFPLLVPYWEKTFDIDLSAPQIGVVNVTDADSVWMEMDDEEDLPSAEELEDWLEDVLEGEINTEDDDDDDDD

SEQ ID NO: 361 - protein, 188 aa, Homo sapiens
MDVNIAPLRAWDDFFPGSDRFARPDFRDISKWNNRVVSNLLYYQTNYLVVAAMMISIVGFLSPFNMILGGIVVVLVFTGFVWAAHNKDVLRRMKKRYPTTFVMVVMLASYFLISMFGGVMVFVFGITFPLLLMFIHASLRLRNLKNKLENKMEGIGLKRTPMGIVLDALEQQEEGINRLTDYISKVKE

SEQ ID NO: 362 - protein, 88 aa, Homo sapiens
MDVNIAPLRAWDDFFPGSDRFARPDFRDISKWNNRVVSNLLYYQTNYLVVAAMMISIVGFLSPFNPPIVSEVSRVFMKSNGKWITRFL

SEQ ID NO: 363 - protein, 93 aa, Homo sapiens
MDVNIAPLRAWDDFFPGSDRFARPDFRDISKWNNRVVSNLLYYQTNYLVVAAMMISIVGLECNGVISAHCNLHLLSSSDSPASASQVAGITGF

SEQ ID NO: 364 - protein, 59 aa, Homo sapiens
MDVNIAPLRAWDDFFPGSDRFARPDFRDISKWNNRVVSNLLYYQTNYLVVAAMMISIVG

SEQ ID NO: 365 - protein, 357 aa, Homo sapiens
MEKYVAAMVLSAAGDALGYYNGKWEFLQDGEKIHRQLAQLGGLDALDVGRWRVSDDTVMHLATAEALVEAGKAPKLTQLYYLLAKHYQDCMEDMDGRAPGGASVHNAMQLKPGKPNGWRIPFNSHEGGCGAAMRAMCIGLRFPHHSQLDTLIQVSIESGRMTHHHPTGYLGALASALFTAYAVNSRPPLQWGKGLMELLPEAKKYIVQSGYFVEENLQHWSYFQTKWENYLKLRGILDGESAPTFPESFGVKERDQFYTSLSYSGWGGSSGHDAPMIAYDAVLAAGDSWKELAHRAFFHGGDSDSTAAIAGCWWGVMYGFKGVSPSNYEKLEYRNRLEETARALYSLGSKEDTVISL

SEQ ID NO: 366 - protein, 357 aa, Homo sapiens; identical to SEQ ID NO: 365

SEQ ID NO: 367 - protein, 357 aa, Homo sapiens; identical to SEQ ID NO: 365

SEQ ID NO: 368 - protein, 357 aa, Homo sapiens; identical to SEQ ID NO: 365

SEQ ID NO: 369 - protein, 125 aa, Homo sapiens
MEKYVAAMVLSAAGDALGYYNGKWEFLQDGEKIHRQLAQLGGLDALDVGRWRVSDDTVMHLATAEALVEAGKAPKLTQLYYLLAKHYQDCMEDMDGRAPGGASVHNAMQLKPGKPNGWRIPFNSH

SEQ ID NO: 370 - protein, 974 aa, Homo sapiens
MAGRVPSLLVLLVFPSSCLAFRSPLSVFKRFKETTRPFSNECLGTTRPVVPIDSSDFALDIRMPGVTPKQSDTYFCMSMRIPVDEEAFVIDFKPRASMDTVHHMLLFGCNMPSSTGSYWFCDEGTCTDKANILYAWARNAPPTRLPKGVGFRVGGETGSKYFVLQVHYGDISAFRDNNKDCSGVSLHLTRLPQPLIAGMYLMMSVDTVIPAGEKVVNSDISCHYKNYPMHVFAYRVHTHHLGKVVSGYRVRNGQWTLIGRQSPQLPQAFYPVGHPVDVSFGDLLAARCVFTGEGRTEATHIGGTSSDEMCNLYIMYYMEAKHAVSFMTCTQNVAPDMFRTIPPEANIPIPVKSDMVMMHEHHKETEYKDKIPLLQQPKREEEEVLDQGDFYSLLSKLLGEREDVVHVHKYNPTEKAESESDLVAEIANVVQKKDLGRSDAREGAEHERGNAILVRDRIHKFHRLVSTLRPPESRVFSLQQPPPGEGTWEPEHTGDFHMEEALDWPGVYLLPGQVSGVALDPKNNLVIFHRGDHVWDGNSFDSKFVYQQIGLGPIEEDTILVIDPNNAAVLQSSGKNLFYLPHGLSIDKDGNYWVTDVALHQVFKLDPNNKEGPVLILGRSMQPGSDQNHFCQPTDVAVDPGTGAIYVSDGYCNSRIVQFSPSGKFITQWGEESSGSSPLPGQFTVPHSLALVPLLGQLCVADRENGRIQCFKTDTKEFVREIKHSSFGRNVFAISYIPGLLFAVNGKPHFGDQEPVQGFVMNFSNGEIIDIFKPVRKHFDMPHDIVASEDGTVYIGDAHTNTVWKFTLTEKLEHRSVKKAGIEVQEIKEAEAVVETKMENKPTSSELQKMQEKQKLIKEPGSGVPVVLITTLLVIPVVVLLAIAIFIRWKKSRAFGADSEHKLETSSGRVLGRFRGKGSGGLNLGNFFASRKGYSRKGFDRLSTEGSDQEKEDDGSESEEEYSAPLPALAPSSS

SEQ ID NO: 371 - protein, 175 aa, Homo sapiens
MAGRVPSLLVLLVFPSSCLAFRSPLSVFKRFKETTRPFSNECLGTTRPVVPIDSSDFALDIRMPGVTPKQLTSSLEPAWILSITCYFLDAICLHPLEVTGFVMKEPVQIKPIFCMPGREMLPLPGSPKVLDSELEERLEVNTLYYRYTMGILVLLEIITRTVLVCPYTSHVCHSL

SEQ ID NO: 372 - protein, 887 aa, Homo sapiens
MAGRVPSLLVLLVFPSSCLAFRSPLSVFKRFKETTRPFSNECLGTTRPVVPIDSSDFALDIRMPGVTPKQSDTYFCMSMRIPVDEEAFVIDFKPRASMDTVHHMLLFGCNMPSSTGSYWFCDEGTCTDKANILYAWARNAPPTRLPKGVGFRVGGETGSKYFVLQVHYGDISAFRDNNKDCSGVSLHLTRLPQPLIAGMYLMMSVDTVIPAGEKVVNSDISCHYKNYPMHVFAYRVHTHHLGKVVSGYRVRNGQWTLIGRQSPQLPQAFYPVGHPVDVSFGDLLAARCVFTGEGRTEATHIGGTSSDEMCNLYIMYYMEAKHAVSFMTCTQNVAPDMFRTIPPEANIPIPVKSDMVMMHEHHKETEYKDKIPLLQQPKREEEEVLDQGDFYSLLSKLLGEREDVVHVHKYNPTEKAESESDLVAEIANVVQKKDLGRSDAREGAEHERGNAILVRDRIHKFHRLVSTLRPPESRVFSLQQPPPGEGTWEPEHTGDFHMEEALDWPGVYLLPGQVSGVALDPKNNLVIFHRGDHVWDGNSFDSKFVYQQIGLGPIEEDTILVIDPNNAAVLQSSGKNLFYLPHGLSIDKDGNYWVTDVALHQVFKLDPNNKEGPVLILGRSMQPGSDQNHFCQPTDVAVDPGTGAIYVSDGYCNSRIVQFSPSGKFITQWGEESSGSSPLPGQFTVPHSLALVPLLGQLCVADRENGRIQCFKTDTKEFVREIKHSSFGRNVFAISYIPGLLFAVNGKPHFGDQEPVQGFVMNFSNGEIIDIFKPVRKHFDMPHDIVASEDGTVYIGDAHTNTVWKFTLTEKLEHRSVKKAGIEVQEIKGKGSGGLNLGNFFASRKGYSRKGFDRLSTEGSDQEKEDDGSESEEEYSAPLPALAPSSS

SEQ ID NO: 373 - protein, 866 aa, Homo sapiens
MAGRVPSLLVLLVFPSSCLAFRSPLSVFKRFKETTRPFSNECLGTTRPVVPIDSSDFALDIRMPGVTPKQSDTYFCMSMRIPVDEEAFVIDFKPRASMDTVHHMLLFGCNMPSSTGSYWFCDEGTCTDKANILYAWARNAPPTRLPKGVGFRVGGETGSKYFVLQVHYGDISAFRDNNKDCSGVSLHLTRLPQPLIAGMYLMMSVDTVIPAGEKVVNSDISCHYKNYPMHVFAYRVHTHHLGKVVSGYRVRNGQWTLIGRQSPQLPQAFYPVGHPVDVSFGDLLAARCVFTGEGRTEATHIGGTSSDEMCNLYIMYYMEAKHAVSFMTCTQNVAPDMFRTIPPEANIPIPVKSDMVMMHEHHKETEYKDKIPLLQQPKREEEEVLDQDFHMEEALDWPGVYLLPGQVSGVALDPKNNLVIFHRGDHVWDGNSFDSKFVYQQIGLGPIEEDTILVIDPNNAAVLQSSGKNLFYLPHGLSIDKDGNYWVTDVALHQVFKLDPNNKEGPVLILGRSMQPGSDQNHFCQPTDVAVDPGTGAIYVSDGYCNSRIVQFSPSGKFITQWGEESSGSSPLPGQFTVPHSLALVPLLGQLCVADRENGRIQCFKTDTKEFVREIKHSSFGRNVFAISYIPGLLFAVNGKPHFGDQEPVQGFVMNFSNGEIIDIFKPVRKHFDMPHDIVASEDGTVYIGDAHTNTVWKFTLTEKLEHRSVKKAGIEVQEIKEAEAVVETKMENKPTSSELQKMQEKQKLIKEPGSGVPVVLITTLLVIPVVVLLAIAIFIRWKKSRAFGDSEHKLETSSGRVLGRFRGKGSGGLNLGNFFASRKGYSRKGFDRLSTEGSDQEKEDDGSESEEEYSAPLPALAPSSS

SEQ ID NO: 374 - protein, 973 aa, Homo sapiens [sequence omitted]

SEQ ID NO: 375 - protein, 905 aa, Homo sapiens
MAGRVPSLLVLLVFPSSCLAFRSPLSVFKRFKETTRPFSNECLGTTRPVVPIDSSDFALDIRMPGVTPKQSDTYFCMSMRIPVDEEAFVIDFKPRASMDTVHHMLLFGCNMPSSTGSYWFCDEGTCTDKANILYAWARNAPPTRLPKGVGFRVGGETGSKYFVLQVHYGDISAFRDNNKDCSGVSLHLTRLPQPLIAGMYLMMSVDTVIPAGEKVVNSDISCHYKNYPMHVFAYRVHTHHLGKVVSGYRVRNGQWTLIGRQSPQLPQAFYPVGHPVDVSFGDLLAARCVFTGEGRTEATHIGGTSSDEMCNLYIMYYMEAKHAVSFMTCTQNVAPDMFRTIPPEANIPIPVKSDMVMMHEHHKETEYKDKIPLLQQPKREEEEVLDQGDFYSLLSKLLGEREDVVHVHKYNPTEKAESESDLVAEIANVVQKKDLGRSDAREGAEHERGNAILVRDRIHKFHRLVSTLRPPESRVFSLQQPPPGEGTWEPEHTGDFHMEEALDWPGVYLLPGQVSGVALDPKNNLVIFHRGDHVWDGNSFDSKFVYQQIGLGPIEEDTILVIDPNNAAVLQSSGKNLFYLPHGLSIDKDGNYWVTDVALHQVFKLDPNNKEGPVLILGRSMQPGSDQNHFCQPTDVAVDPGTGAIYVSDGYCNSRIVQFSPSGKFITQWGEESSGSSPLPGQFTVPHSLALVPLLGQLCVADRENGRIQCFKTDTKEFVREIKHSSFGRNVFAISYIPGLLFAVNGKPHFGDQEPVQGFVMNFSNGEIIDIFKPVRKHFDMPHDIVASEDGTVYIGDAHTNTVWKFTLTEKLEHRSVKKAGIEVQEIKDSEHKLETSSGRVLGRFRGKGSGGLNLGNFFASRKGYSRKGFDRLSTEGSDQEKEDDGSESEEEYSAPLPALAPSSS

SEQ ID NO: 376 - protein, 250 aa, Homo sapiens
  misc_feature (1)..(1): Xaa can be any naturally occurring amino acid
XRIQCFKTDTKEFVREIKHSSFGRNVFAISYIPGLLFAVNGKPHFGDQEPVQGFVMNFSNGEIIDIFKPVRKHFDMPHDIVASEDGTVYIGDAHTNTVWKFTLTEKLEHRSVKKAGIEVQEIKEAEAVVETKMENKPTSSELQKMQEKQKLIKEPGSGVPVVLITTLLVIPVVVLLAIAIFIRWKKSRAFGGKGSGGLNLGNFFASRKGYSRKGFDRLSTEGSDQEKEDDGSESEEEYSAPLPALAPSSS

SEQ ID NO: 377 - protein, 29 aa, Homo sapiens
MAGRVPSLLVLLVFPSSCLAFRSPLSVFK

SEQ ID NO: 378 - protein, 28 aa, Homo sapiens
MAGRVPSLLVLLVFPSSCLAFRSPLSVF

SEQ ID NO: 379 - protein, 53 aa, Homo sapiens
MAGRVPSLLVLLVFPSSCLAFRSPLSVFKRFKETTRPFSNECLGTTRPVVPID

SEQ ID NO: 380 - protein, 42 aa, Homo sapiens
MAGRVPSLLVLLVFPSSCLAFRSPLSVFKRFKETTRPFSNEC

SEQ ID NO: 381 - protein, 68 aa, Homo sapiens
MAGRVPSLLVLLVFPSSCLAFRSPLSVFKRFKETTRPFSNECLGTTRPVVPIDSSDFALDIRMPGVTP

SEQ ID NO: 382 - protein, 25 aa, Homo sapiens
MAGRVPSLLVLLVFPSSCLAFRSPL

SEQ ID NO: 383 - protein, 691 aa, Homo sapiens
MMRNHRIASSLCGDQVFSKKKKKKKKNNMAAKEKLEAVLNVALRVPSIMLLDVLYRWDVSSFFQQIQRSSLSNNPLFQYKYLALNMHYVGYILSVVLLTLPRQHLVQLYLYFLTALLLYAGHQISRDYVRSELEFAYEGPMYLEPLSMNRFTTALIGQLVVCTLCSCVMKTKQIWLFSAHMLPLLARLCLVPLETIVIINKFAMIFTGLEVLYFLGSNLLVPYNLAKSAYRELVQVVEVYGLLALGMSLWNQLVVPVLFMVFWLVLFALQIYSYFSTRDQPASRERLLFLFLTSIAECCSTPYSLLGLVFTVSFVALGVLTLCKFYLQGYRAFMNDPAMNRGMTEGVTLLILAVQTGLIELQVVHRAFLLSIILFIVVASILQSMLEIADPIVLALGASRDKSLWKHFRAVSLCLFLLVFPAYMAYMICQFFHMDFWLLIIISSSILTSLQVLGTLFIYVLFMVEEFRKEPVENMDDVIYYVNGTYRLLEFLVALCVVAYGVSETIFGEWTVMGSMIIFIHSYYNVWLRAQLGWKSFLLRRDAVNKIKSLPIATKEQLEKHNDICAICYQDMKSAVITPCSHFFHAGCLKKWLYVQETCPLCHCHLKNSSQLPGLGTEPVLQPHAGAEQNVMFQEGTEPPGQEHTPGTRIQEGSRDNNEYIARRPDNQEGAFDPKEYPHSAKDEAHPVESA

SEQ ID NO: 384 - protein, 663 aa, Homo sapiens
MAAKEKLEAVLNVALRVPSIMLLDVLYRWDVSSFFQQIQRSSLSNNPLFQYKYLALNMHYVGYILSVVLLTLPRQHLVQLYLYFLTALLLYAGHQISRDYVRSELEFAYEGPMYLEPLSMNRFTTALIGQLVVCTLCSCVMKTKQIWLFSAHMLPLLARLCLVPLETIVIINKFAMIFTGLEVLYFLGSNLLVPYNLAKSAYRELVQVVEVYGLLALGMSLWNQLVVPVLFMVFWLVLFALQIYSYFSTRDQPASRERLLFLFLTSIAECCSTPYSLLGLVFTVSFVALGVLTLCKFYLQGYRAFMNDPAMNRGMTEGVTLLILAVQTGLIELQVVHRAFLLSIILFIVVASILQSMLEIADPIVLALGASRDKSLWKHFRAVSLCLFLLVFPAYMAYMICQFFHMDFWLLIIISSSILTSLQVLGTLFIYVLFMVEEFRKEPVENMDDVIYYVNGTYRLLEFLVALCVVAYGVSETIFGEWTVMGSMIIFIHSYYNVWLRAQLGWKSFLLRRDAVNKIKSLPIATKEQLEKHNDICAICYQDMKSAVITPCSHFFHAGCLKKWLYVQETCPLCHCHLKNSSQLPGLGTEPVLQPHAGAEQNVMFQEGTEPPGQEHTPGTRIQEGSRDNNEYIARRPDNQEGAFDPKEYPHSAKDEAHPVESA

SEQ ID NO: 385 - protein, 693 aa, Homo sapiens
MHRDRISPSNSPTWSLQVFSKKKKKKKKNNMAAKEKLEAVLNVALRVPSIMLLDVLYRWDVSSFFQQIQRSSLSNNPLFQYKYLALNMHYVGYILSVVLLTLPRQHLVQLYLYFLTALLLYAGHQISRDYVRSELEFAYEGPMYLEPLSMNRFTTALIGQLVVCTLCSCVMKTKQIWLFSAHMLPLLARLCLVPLETIVIINKFAMIFTGLEVLYFLGSNLLVPYNLAKSAYRELVQVVEVYGLLALGMSLWNQLVVPVLFMVFWLVLFALQIYSYFSTRDQPASRERLLFLFLTSIAECCSTPYSLLGLVFTVSFVALGVLTLCKFYLQGYRAFMNDPAMNRGMTEGVTLLILAVQTGLIELQVVHRAFLLSIILFIVVASILQSMLEIADPIVLALGASRDKSLWKHFRAVSLCLFLLVFPAYMAYMICQFFHMDFWLLIIISSSILTSLQVLGTLFIYVLFMVEEFRKEPVENMDDVIYYVNGTYRLLEFLVALCVVAYGVSETIFGEWTVMGSMIIFIHSYYNVWLRAQLGWKSFLLRRDAVNKIKSLPIATKEQLEKHNDICAICYQDMKSAVITPCSHFFHAGCLKKWLYVQETCPLCHCHLKNSSQLPGLGTEPVLQPHAGAEQNVMFQEGTEPPGQEHTPGTRIQEGSRDNNEYIARRPDNQEGAFDPKEYPHSAKDEAHPVESA

SEQ ID NO: 386 - protein, 663 aa, Homo sapiens; identical to SEQ ID NO: 384

SEQ ID NO: 387 - protein, 677 aa, Homo sapiens
MVFSKKKKKKKKNNMAAKEKLEAVLNVALRVPSIMLLDVLYRWDVSSFFQQIQRSSLSNNPLFQYKYLALNMHYVGYILSVVLLTLPRQHLVQLYLYFLTALLLYAGHQISRDYVRSELEFAYEGPMYLEPLSMNRFTTALIGQLVVCTLCSCVMKTKQIWLFSAHMLPLLARLCLVPLETIVIINKFAMIFTGLEVLYFLGSNLLVPYNLAKSAYRELVQVVEVYGLLALGMSLWNQLVVPVLFMVFWLVLFALQIYSYFSTRDQPASRERLLFLFLTSIAECCSTPYSLLGLVFTVSFVALGVLTLCKFYLQGYRAFMNDPAMNRGMTEGVTLLILAVQTGLIELQVVHRAFLLSIILFIVVASILQSMLEIADPIVLALGASRDKSLWKHFRAVSLCLFLLVFPAYMAYMICQFFHMDFWLLIIISSSILTSLQVLGTLFIYVLFMVEEFRKEPVENMDDVIYYVNGTYRLLEFLVALCVVAYGVSETIFGEWTVMGSMIIFIHSYYNVWLRAQLGWKSFLLRRDAVNKIKSLPIATKEQLEKHNDICAICYQDMKSAVITPCSHFFHAGCLKKWLYVQETCPLCHCHLKNSSQLPGLGTEPVLQPHAGAEQNVMFQEGTEPPGQEHTPGTRIQEGSRDNNEYIARRPDNQEGAFDPKEYPHSAKDEAHPVESA

SEQ ID NO: 388 - protein, 680 aa, Homo sapiens
MAEVVFSKKKKKKKKNNMAAKEKLEAVLNVALRVPSIMLLDVLYRWDVSSFFQQIQRSSLSNNPLFQYKYLALNMHYVGYILSVVLLTLPRQHLVQLYLYFLTALLLYAGHQISRDYVRSELEFAYEGPMYLEPLSMNRFTTALIGQLVVCTLCSCVMKTKQIWLFSAHMLPLLARLCLVPLETIVIINKFAMIFTGLEVLYFLGSNLLVPYNLAKSAYRELVQVVEVYGLLALGMSLWNQLVVPVLFMVFWLVLFALQIYSYFSTRDQPASRERLLFLFLTSIAECCSTPYSLLGLVFTVSFVALGVLTLCKFYLQGYRAFMNDPAMNRGMTEGVTLLILAVQTGLIELQVVHRAFLLSIILFIVVASILQSMLEIADPIVLALGASRDKSLWKHFRAVSLCLFLLVFPAYMAYMICQFFHMDFWLLIIISSSILTSLQVLGTLFIYVLFMVEEFRKEPVENMDDVIYYVNGTYRLLEFLVALCVVAYGVSETIFGEWTVMGSMIIFIHSYYNVWLRAQLGWKSFLLRRDAVNKIKSLPIATKEQLEKHNDICAICYQDMKSAVITPCSHFFHAGCLKKWLYVQETCPLCHCHLKNSSQLPGLGTEPVLQPHAGAEQNVMFQEGTEPPGQEHTPGTRIQEGSRDNNEYIARRPDNQEGAFDPKEYPHSAKDEAHPVESA

SEQ ID NO: 389 - protein, 663 aa, Homo sapiens; identical to SEQ ID NO: 384

SEQ ID NO: 390 - protein, 185 aa, Homo sapiens
MAGPRPRWRDQLLFMSIIVLVIVVICLMFYALLWEAGNLTDLPNLRIGFYNFCLWNEDTSTLQCHQFPELEALGVPRVGLGLARLGVYGSLVLTLFAPQPLLLAQCNSDERAWRLAVGFLAVSSVLLAGGLGLFLSYVWKWVRLSLPGPGFLALGSAQALLILLLIAMAVFPLRAERAESKLESC

SEQ ID NO: 391 - protein, 486 aa, Homo sapiens
MKGRRRRRREYCKFALLLVLYTLVLLLVPSVLDGGRDGDKGAEHCPGLQRSLGVWSLEAAAAGEREQGAEARAAEEGGANQSPRFPSNLSGAVGEAVSREKQHIYVHATWRTGSSFLGELFNQHPDVFYLYEPMWHLWQALYPGDAESLQGALRDMLRSLFRCDFSVLRLYAPPGDPAARAPDTANLTTAALFRWRTNKVICSPPLCPGAPRARAEVGLVEDTACERSCPPVAIRALEAECRKYPVVVIKDVRLLDLGVLVPLLRDPGLNLKVVQLFRDPRAVHNSRLKSRQGLLRESIQVLRTRQRGDRFHRVLLAHGVGARPGGQSRALPAAPRADFFLTGALEVICEAWLRDLLFARGAPAWLRRRYLRLRYEDLVRQPRAQLRRLLRFSGLRALAALDAFALNMTRGAAYGADRPFHLSARDAREAVHAWRERLSREQVRQVEAACAPAMRLLAYPRSGEEGDAEQPREGETPLEMDADGAT

SEQ ID NO: 392 - protein, 494 aa, Homo sapiens
MLTSKGQGFLHGGLCLWLCVFTPFFKGCVGCATEERLFHKLFSHYNQFIRPVENVSDPVTVHFEVAITQLANVDEVNQIMETNLWLRHIWNDYKLRWDPMEYDGIETLRVPADKIWKPDIVLYNNAVGDFQVEGKTKALLKYNGMITWTPPAIFKSSCPMDITFFPFDHQNCSLKFGSWTYDKAEIDLLIIGSKVDMNDFWENSEWEIIDASGYKHDIKYNCCEEIYTDITYSFYIRRLPMFYTINLIIPCLFISFLTVLVFYLPSDCGEKVTLCISVLLSLTVFLLVITETIPSTSLVVPLVGEYLLFTMIFVTLSIVVTVFVLNIHYRTPTTHTMPRWVKTVFLKLLPQVLLMRWPLDKTRGTGSDAVPRGLARRPAKGKLASHGEPRHLKECFHCHKSNELATSKRRLSHQPLQWVVENSEHSPEVEDVINSVQFIAENMKSHNETKEVEDDWKYVAMVVDRVFLWVFIIVCVFGTAGLFLQPLLGNTGKS

SEQ ID NO: 393 - protein, 111 aa, Homo sapiens
METNLWLRHIWNDYKLRWDPMEYDGIETLRVPADKIWKPDIVLYNNAVGDFQVEGKTKALLKYNGMITWTPPAIFKSSCPMDITFFPFDHQNCSLKFGSWTYDKAEIDLLI

SEQ ID NO: 394 - protein, 479 aa, Homo sapiens
MLTSKGQGFLHGGLCLWLCVFTPFFKGCVGCATEERLFHKLFSHYNQFIRPVENVSDPVTVHFEVAITQLANVIWNDYKLRWDPMEYDGIETLRVPADKIWKPDIVLYNNAVGDFQVEGKTKALLKYNGMITWTPPAIFKSSCPMDITFFPFDHQNCSLKFGSWTYDKAEIDLLIIGSKVDMNDFWENSEWEIIDASGYKHDIKYNCCEEIYTDITYSFYIRRLPMFYTINLIIPCLFISFLTVLVFYLPSDCGEKVTLCISVLLSLTVFLLVITETIPSTSLVVPLVGEYLLFTMIFVTLSIVVTVFVLNIHYRTPTTHTMPRWVKTVFLKLLPQVLLMRWPLDKTRGTGSDAVPRGLARRPAKGKLASHGEPRHLKECFHCHKSNELATSKRRLSHQPLQWVVENSEHSPEVEDVINSVQFIAENMKSHNETKEVEDDWKYVAMVVDRVFLWVFIIVCVFGTAGLFLQPLLGNTGKS

SEQ ID NO: 395 - protein, 1337 aa, Homo sapiens
MKPAAREARLPPRSPGLRWALPLLLLLLRLGQILCAGGTPSPIPDPSVATVATGENGITQISSTAESFHKQNGTGTPQVETNTSEDGESSGANDSLRTPEQGSNGTDGASQKTPSSTGPSPVFDIKAVSISPTNVILTWKSNDTAASEYKYVVKHKMENEKTITVVHQPWCNITGLRPATSYVFSITPGIGNETWGDPRVIKVITEPIPVSDLRVALTGVRKAALSWSNGNGTASCRVLLESIGSHEELTQDSRLQVNISGLKPGVQYNINPYLLQSNKTKGDPLGTEGGLDASNTERSRAGSPTAPVHDESLVGPVDPSSGQQSRDTEVLLVGLEPGTRYNATVYSQAANGTEGQPQAIEFRTNAIQVFDVTAVNISATSLTLIWKVSDNESSSNYTYKIHVAGETDSSNLNVSEPRAVIPGLRSSTFYNITVCPVLGDIEGTPGFLQVHTPPVPVSDFRVTVVSTTEIGLAWSSHDAESFQMHITQEGAGNSRVEITTNQSIIIGGLFPGTKYCFEIVPKGPNGTEGASRTVCNRTVPSAVFDIHVVYVTTTEMWLDWKSPDGASEYVYHLVIESKHGSNHTSTYDKAITLQGLIPGTLYNITISPEVDHVWGDPNSTAQYTRPSNVSNIDVSTNTTAATLSWQNFDDASPTYSYCLLIEKAGNSSNATQVVTDIGITDATVTELIPGSSYTVEIFAQVGDGIKSLEPGRKSFCTDPASMASFDCEVVPKEPALVLKWTCPPGANAGFELEVSSGAWNNATHLESCSSENGTEYRTEVTYLNFSTSYNISITTVSCGKMAAPTRNTCTTGITDPPPPDGSPNITSVSHNSVKVKFSGFEASHGPIKAYAVILTTGEAGHPSADVLKYTYEDFKKGASDTYVTYLIRTEEKGRSQSLSEVLKYEIDVGNESTTLGYYNGKLEPLGSYRACVAGFTNITFHPQNKGLIDGAESYVSFSRYSDAVSLPQDPGVICGAVFGCIFGALVIVTVGGFIFWRKKRKDAKNNEVSFSQIKPKKSKLIRVENFEAYFKKQQADSNCGFAEEYEDLKLVGISQPKYAAELAENRGKNRYNNVLPYDISRVKLSVQTHSTDDYINANYMPGYHSKKDFIATQGPLPNTLKDFWRMVWEKNVYAIIMLTKCVEQGRTKCEEYWPSKQAQDYGDITVAMTSEIVLPEWTIRDFTVKNIQTSESHPLRQFHFTSWPDHGVPDTTDLLINFRYLVRDYMKQSPPESPILVHCSAGVGRTGTFIAIDRLIYQIENENTVDVYGIVYDLRMHRPLMVQTEDQYVFLNQCVLDIVRSQKDSKVDLIYQNTTAMTIYENLAPVTTFGKTNGYIA

SEQ ID NO: 396 - protein, 539 aa, Homo sapiens
MKPAAREARLPPRSPGLRWALPLLLLLLRLGQILCAGGTPSPIPDPSVATVATGENGITQISSTAESFHKQNGTGTPQVETNTSEDGESSGANDSLRTPEQGSNGTDGASQKTPSSTGPSPVFDIKAVSISPTNVILTWKSNDTAASEYKYVVKHKMENEKTITVVHQPWCNITGLRPATSYVFSITPGIGNETWGDPRVIKVITEPIPVSDLRVALTGVRKAALSWSNGNGTASCRVLLESIGSHEELTQDSRLQVNISGLKPGVQYNINPYLLQSNKTKGDPLGTEGGLDASNTERSRAGSPTAPVHDESLVGPVDPSSGQQSRDTEVLLVGLEPGTRYNATVYSQAANGTEGQPQAIEFRTNAIQVFDVTAVNISATSLTLIWKVSDNESSSNYTYKIHVAGETDSSNLNVSEPRAVIPGLRSSTFYNITVCPVLGDIEGTPGFLQVHTPPVPVSDFRVTVVSTTEIGLAWSSHDAESFQMHITQEGAGNSRVEITTNQSIIIGGLFPGTKYCFEIVPKGPNGTEGASRTVCNRTG

SEQ ID NO: 397 - protein, 147 aa, Homo sapiens [sequence omitted]

SEQ ID NO: 398 - protein, 120 aa, Homo sapiens
MKPAAREARLPPRSPGLRWALPLLLLLLRLGQILCAGGRPSPVFDIKAVSISPTNVILTWKSNDTAASEYKYVVKHKMENEKTITVVHQPWCNITGLRPATSYVFSITPGIGNETWGDPR

SEQ ID NO: 399 - protein, 1338 aa, Homo sapiens [sequence omitted]

SEQ ID NO: 400 - protein, 1342 aa, Homo sapiens
MKPAAREARLPPRSPGLRWALPLLLLLLRLGQILCAGGTPSPIPDPSVATVATGENGITQISSTAESFHKQNGTGTPQVETNTSEDGESSGANDSLRTPEQGSNGTDGASQKTPSSTGPSPVFDIKAVSISPTNVILTWKSNDTAASEYKYVVKHKMENEKTITVVHQPWCNITGLRPATSYVFSITPGIGNETWGDPRVIKVITEPIPVSDLRVALTGVRKAALSWSNGNGTASCRVLLESIGSHEELTQDSRLQVNISGLKPGVQYNINPYLLQSNKTKGDPLGTEGGLDASNTERSRAGSPTAPVHDESLVGPVDPSSGQQSRDTEVLLVGLEPGTRYNATVYSQAANGTEGQPQAIEFRTNAIQVFDVTAVNISATSLTLIWKVSDNESSSNYTYKIHVAGETDSSNLNVSEPRAVIPGLRSSTFYNITVCPVLGDIEGTPGFLQVHTPPVPVSDFRVTVVSTTEIGLAWSSHDAESFQMHITQEGAGNSRVEITTNQSIIIGGLFPGTKYCFEIVPKGPNGTEGASRTVCNRTVPSAVFDIHVVYVTTTEMWLDWKSPDGASEYVYHLVIESKHGSNHTSTYDKAITLQGLIPGTLYNITISPEVDHVWGDPNSTAQYTRPSNVSNIDVSTNTTAATLSWQNFDDASPTYSYCLLIEKAGNSSNATQVVTDIGITDATVTELIPGSSYTVEIFAQVGDGIKSLEPGRKSFCTDPASMASFDCEVVPKEPALVLKWTCPPGANAGFELEVSSGAWNNATHLESCSSENGTEYRTEVTYLNFSTSYNISITTVSCGKMAAPTRNTCTTGITDPPPPDGSPNITSVSHNSVKVKFSGFEASHGPIKAYAVILTTGEAGHPSADVLKYTYEDFKKGASDTYVTYLIRTEEKGRSQSLSEVLKYEIDVGNESTTLGYYNGKLEPLGSYRCLLRACVAGFTNITFHPQNKGLIDGAESYVSFSRYSDAVSLPQDPGVICGAVFGCIFGALVIVTVGGFIFWRKKRKDAKNNEVSFSQIKSLKRSKLIRVENFEAYFKKQQADSNCGFAEEYEDLKLVGISQPKYAAELAENRGKNRYNNVLPYDISRVKLSVQTHSTDDYINANYMPGYHSKKDFIATQGPLPNTLKDFWRMVWEKNVYAIIMLTKCVEQGRTKCEEYWPSKQAQDYGDITVAMTSEIVLPEWTIRDFTVKNIQTSESHPLRQFHFTSWPDHGVPDTTDLLINFRYLVRDYMKQSPPESPILVHCSAGVGRTGTFIAIDRLIYQIENENTVDVYGIVYDLRMHRPLMVQTEDQYVFLNQCVLDIVRSQKDSKVDLIYQNTTAMTIYENLAPVTTFGKTNGYIA

SEQ ID NO: 401 - protein, 858 aa, Homo sapiens
MLQTKDLIWTLFFLGTAVSLQVDIVPSQGEISVGESKFFLCQVAGDAKDKDISWFSPNGEKLTPNQQRISVVWNDDSSSTLTIYNANIDDAGIYKCVVTGEDGSESEATVNVKIFQKLMFKNAPTPQEFREGEDAVIVCDVVSSLPPTIIWKHKGRDVILKKDVRFIVLSNNYLQIRGIKKTDEGTYRCEGRILARGEINFKDIQVIVNVPPTIQARQNIVNATANLGQSVTLVCDAEGFPEPTMSWTKDGEQIEQEEDDEKYIFSDDSSQLTIKKVDKNDEAEYICIAENKAGEQDATIHLKVFAKPKITYVENQTAMELEEQVTLTCEASGDPIPSITWRTSTRNISSEEKASWTRPEKQETLDGHMVVRSHARVSSLTLKSIQYTDAGEYICTASNTIGQDSQSMYLEVQYAPKLQGPVAVYTWEGNQVNITCEVFAYPSATISWFRDGQLLPSSNYSNIKIYNTPSASYLEVTPDSENDFGNYNCTAVNRIGQESLEFILVQADTPSSPSIDQVEPYSSTAQVQFDEPEATGGVPILKYKAEWRAVGEEVWHSKWYDAKEASMEGIVTIVGLKPETTYAVRLAALNGKGLGEISAASEFKTQPVQGEPSAPKLEGQMGEDGNSIKVNLIKQDDGGSPIRHYLVRYRALSSEWKPEIRLPSGSDHVMLKSLDWNAEYEVYVVAENQQGKSKAAHFVFRTSAQPTAIPANGSPTSGLSTGAIVGILIVIFVLLLVVVDITCYFLNKCGLFMCIAVNLCGKAGPGAKGKDMEEGKAAFSKDESKEPIVEVRTEEERTPNHDGGKHTEPNETTPLTEPEKGPVEAKPECQETETKPAPAEVKTVPNDATQTKENESKA

SEQ ID NO: 402 - protein, 725 aa, Homo sapiens
MLQTKDLIWTLFFLGTAVSLQVDIVPSQGEISVGESKFFLCQVAGDAKDKDISWFSPNGEKLTPNQQRISVVWNDDSSSTLTIYNANIDDAGIYKCVVTGEDGSESEATVNVKIFQKLMFKNAPTPQEFREGEDAVIVCDVVSSLPPTIIWKHKGRDVILKKDVRFIVLSNNYLQIRGIKKTDEGTYRCEGRILARGEINFKDIQVIVNVPPTIQARQNIVNATANLGQSVTLVCDAEGFPEPTMSWTKDGEQIEQEEDDEKYIFSDDSSQLTIKKVDKNDEAEYICIAENKAGEQDATIHLKVFAKPKITYVENQTAMELEEQVTLTCEASGDPIPSITWRTSTRNISSEEKTLDGHMVVRSHARVSSLTLKSIQYTDAGEYICTASNTIGQDSQSMYLEVQYAPKLQGPVAVYTWEGNQVNITCEVFAYPSATISWFRDGQLLPSSNYSNIKIYNTPSASYLEVTPDSENDFGNYNCTAVNRIGQESLEFILVQADTPSSPSIDQVEPYSSTAQVQFDEPEATGGVPILKYKAEWRAVGEEVWHSKWYDAKEASMEGIVTIVGLKPETTYAVRLAALNGKGLGEISAASEFKTQPVREPSAPKLEGQMGEDGNSIKVNLIKQDDGGSPIRHYLVRYRALSSEWKPEIRLPSGSDHVMLKSLDWNAEYEVYVVAENQQGKSKAAHFVFRTSAQPTAIPATLGGNSASYTFVSLLFSAVTLLLLC

SEQ ID NO: 403 - protein, 84 aa, Homo sapiens
  misc_feature (1)..(1): Xaa can be any naturally occurring amino acid
XQDDGGSPIRHYLVRYRALSSEWKPEIRLPSGSDHVMLKSLDWNAEYEVYVVAENQQGKSKAAHFVFRTSAQPTAIPVTLLLLC

SEQ ID NO: 404 - protein, 305 aa, Homo sapiens
YNTPSASYLEVTPDSENDFGNYNCTAVNRIGQESLEFILVQADTPSSPSIDQVEPYSSTAQVQFDEPEATGGVPILKYKAEWRAVGEEVWHSKWYDAKEASMEGIVTIVGLKPETTYAVRLAALNGKGLGEISAASEFKTQPVHSPPPPASASSSTPVPLSPPDTTWPLPALATTEPAREPSAPKLEGQMGEDGNSIKVNLIKQDDGGSPIRHYLVRYRALSSEWKPEIRLPSGSDHVMLKSLDWNAEYEVYVVAENQQGKSKAAHFVFRTSAQPTAIPATLGGNSASYTFVSLLFSAVTLLLLC

SEQ ID NO: 405 - protein, 468 aa, Homo sapiens
  misc_feature (1)..(1): Xaa can be any naturally occurring amino acid
XSGSDHVMLKSLDWNAEYEVYVVAENQQGKSKAAHFVFRTSAQPTAIPANGSPTSGLSTGAIVGILIVIFVLLLVVVDITCYFLNKCGLFMCIAVNLCGKAGPGAKGKDMEEGKAAFSKDESKEPIVEVRTEEERTPNHDGGKHTEPNETTPLTEPELPADTTATVEDMLPSVTTVTTNSDTITETFATAQNSPTSETTTLTSSIAPPATATPDSNSVPAGQATPSKGPSASAPSPAPASAPKVAPLVDLSDTPTSTPAASNLSSSVLANQGAVLSPSAPAGVGEASKAPPASKPTPAPVPTPTGAASPLAAAAAPATEAPQAKQEAPSTKGPDPEPTQPGAAKSPAEAATALASPKSEAASVSTTNPSQGEDFKMDEGNFKTPDIDLAKDVFAALGSPAPAAGASGQAPELAPSTADSSVSPAPAKTEKGPVEAKPECQETETKPAPAEVKTVPNDATQTKENESKA

SEQ ID NO: 406 - protein, 372 aa, Homo sapiens
  misc_feature (1)..(1): Xaa can be any naturally occurring amino acid
XTPSSPSIDQVEPYSSTAQVQFDEPEATGGVPILKYKAEWRAVGEEVWHSKWYDAKEASMEGIVTIVGLKPETTYAVRLAALNGKGLGEISAASEFKTQPVHSPPPPASASSSTPVPLSPPDKGEPSAPKLEGQMGEDGNSIKVNLIKQDDGGSPIRHYLVRYRALSSEWKPEIRLPSGSDHVMLKSLDWNAEYEVYVVAENQQGKSKAAHFVFRTSAQPTAIPANGSPTSGLSTGAIVGILIVIFVLLLVVVDITCYFLNKCGLFMCIAVNLCGKAGPGAKGKDMEEGKAAFSKDESKEPIVEVRTEEERTPNHDGGKHTEPNETTPLTEPEKGPVEAKPECQETETKPAPAEVKTVPNDATQTKENESKA

SEQ ID NO: 407 - protein, 364 aa, Homo sapiens
MLQTKDLIWTLFFLGTAVSLQVDIVPSQGEISVGESKFFLCQVAGDAKDKDISWFSPNGEKLTPNQQRISVVWNDDSSSTLTIYNANIDDAGIYKCVVTGEDGSESEATVNVKIFQKLMFKNAPTPQEFREGEDAVIVCDVVSSLPPTIIWKHKGRDVILKKDVRFIVLSNNYLQIRGIKKTDEGTYRCEGRILARGEINFKDIQVIVNVPPTIQARQNIVNATANLGQSVTLVCDAEGFPEPTMSWTKDGEQIEQEEDDEKYIFSDDSSQLTIKKVDKNDEAEYICIAENKAGEQDATIHLKVFAKPKITYVENQTAMELEEQVTLTCEASGDPIPSITWRTSTRNISSEEKASWTRPEKQEV

SEQ ID NO: 408 - protein, 848 aa, Homo sapiens
MLQTKDLIWTLFFLGTAVSLQVDIVPSQGEISVGESKFFLCQVAGDAKDKDISWFSPNGEKLTPNQQRISVVWNDDSSSTLTIYNANIDDAGIYKCVVTGEDGSESEATVNVKIFQKLMFKNAPTPQEFREGEDAVIVCDVVSSLPPTIIWKHKGRDVILKKDVRFIVLSNNYLQIRGIKKTDEGTYRCEGRILARGEINFKDIQVIVNVPPTIQARQNIVNATANLGQSVTLVCDAEGFPEPTMSWTKDGEQIEQEEDDEKYIFSDDSSQLTIKKVDKNDEAEYICIAENKAGEQDATIHLKVFAKPKITYVENQTAMELEEQVTLTCEASGDPIPSITWRTSTRNISSEEKTLDGHMVVRSHARVSSLTLKSIQYTDAGEYICTASNTIGQDSQSMYLEVQYAPKLQGPVAVYTWEGNQVNITCEVFAYPSATISWFRDGQLLPSSNYSNIKIYNTPSASYLEVTPDSENDFGNYNCTAVNRIGQESLEFILVQADTPSSPSIDQVEPYSSTAQVQFDEPEATGGVPILKYKAEWRAVGEEVWHSKWYDAKEASMEGIVTIVGLKPETTYAVRLAALNGKGLGEISAASEFKTQPVQGEPSAPKLEGQMGEDGNSIKVNLIKQDDGGSPIRHYLVRYRALSSEWKPEIRLPSGSDHVMLKSLDWNAEYEVYVVAENQQGKSKAAHFVFRTSAQPTAIPANGSPTSGLSTGAIVGILIVIFVLLLVVVDITCYFLNKCGLFMCIAVNLCGKAGPGAKGKDMEEGKAAFSKDESKEPIVEVRTEEERTPNHDGGKHTEPNETTPLTEPEKGPVEAKPECQETETKPAPAEVKTVPNDATQTKENESKA

SEQ ID NO: 409 - protein, 165 aa, Homo sapiens
EFILVQADTPSSPSIDQVEPYSSTAQVQFDEPEATGGVPILKYKAEWRAVGEEVWHSKWYDAKEASMEGIVTIVGLKPETTYAVRLAALNGKGLGEISAASEFKTQPVHSPPPPASASSSTPVPLSPPDTTWPLPALATTEPAKNIAQNHCCNMFQAGLHNALMK

SEQ ID NO: 410 - protein, 357 aa, Homo sapiens
  misc_feature (1)..(1): Xaa can be any naturally occurring amino acid
XFILVQADTPSSPSIDQVEPYSSTAQVQFDEPEATGGVPILKYKAEWRAVGEEVWHSKWYDAKEASMEGIVTIVGLKPETTYAVRLAALNGKGLGEISAASEFKTQPVREPSAPKLEGQMGEDGNSIKVNLIKQDDGGSPIRHYLVRYRALSSEWKPEIRLPSGSDHVMLKSLDWNAEYEVYVVAENQQGKSKAAHFVFRTSAQPTAIPANGSPTSGLSTGAIVGILIVIFVLLLVVVDITCYFLNKCGLFMCIAVNLCGKAGPGAKGKDMEEGKAAFSKDESKEPIVEVRTEEERTPNHDGGKHTEPNETTPLTEPEKGPVEAKPECQETETKPAPAEVKTVPNDATQTKENESKA

SEQ ID NO: 411 - protein, 133 aa, Homo sapiens
MLQTKDLIWTLFFLGTAAKPKITYVENQTAMELEEQVTLTCEASGDPIPSITWRTSTRNISSEEKTLDGHMVVRSHARVSSLTLKSIQYTDAGEYICTASNTIGQDSQSMYLEVQYAPKLQGPVAVYTWEGNQ

SEQ ID NO: 412 - protein, 858 aa, Homo sapiens [sequence omitted]

SEQ ID NO: 413 - protein, 884 aa, Homo sapiens [sequence omitted]

SEQ ID NO: 414 - protein, 848 aa, Homo sapiens [sequence omitted]

SEQ ID NO: 415 - protein, 884 aa, Homo sapiens
MLQTKDLIWTLFFLGTAVSLQVDIVPSQGEISVGESKFFLCQVAGDAKDKDISWFSPNGEKLTPNQQRISVVWNDDSSSTLTIYNANIDDAGIYKCVVTGEDGSESEATVNVKIFQKLMFKNAPTPQEFREGEDAVIVCDVVSSLPPTIIWKHKGRDVILKKDVRFIVLSNNYLQIRGIKKTDEGTYRCEGRILARGEINFKDIQVIVNVPPTIQARQNIVNATANLGQSVTLVCDAEGFPEPTMSWTKDGEQIEQEEDDEKYIFSDDSSQLTIKKVDKNDEAEYICIAENKAGEQDATIHLKVFAKPKITYVENQTAMELEEQVTLTCEASGDPIPSITWRTSTRNISSEEKASWTRPEKQEVHAPWNWQVGRQKGQAGSAGFPGSHETLDGHMVVRSHARVSSLTLKSIQYTDAGEYICTASNTIGQDSQSMYLEVQYAPKLQGPVAVYTWEGNQVNITCEVFAYPSATISWFRDGQLLPSSNYSNIKIYNTPSASYLEVTPDSENDFGNYNCTAVNRIGQESLEFILVQADTPSSPSIDQVEPYSSTAQVQFDEPEATGGVPILKYKAEWRAVGEEVWHSKWYDAKEASMEGIVTIVGLKPETTYAVRLAALNGKGLGEISAASEFKTQPVQGEPSAPKLEGQMGEDGNSIKVNLIKQDDGGSPIRHYLVRYRALSSEWKPEIRLPSGSDHVMLKSLDWNAEYEVYVVAENQQGKSKAAHFVFRTSAQPTAIPANGSPTSGLSTGAIVGILIVIFVLLLVVVDITCYFLNKCGLFMCIAVNLCGKAGPGAKGKDMEEGKAAFSKDESKEPIVEVRTEEERTPNHDGGKHTEPNETTPLTEPEKGPVEAKPECQETETKPAPAEVKTVPNDATQTKENESKA

SEQ ID NO: 416 - protein, 136 aa, Homo sapiens [sequence omitted]

SEQ ID NO: 417 - protein, 726 aa, Homo sapiens
MLQTKDLIWTLFFLGTAVSLQVDIVPSQGEISVGESKFFLCQVAGDAKDKDISWFSPNGEKLTPNQQRISVVWNDDSSSTLTIYNANIDDAGIYKCVVTGEDGSESEATVNVKIFQKLMFKNAPTPQEFREGEDAVIVCDVVSSLPPTIIWKHKGRDVILKKDVRFIVLSNNYLQIRGIKKTDEGTYRCEGRILARGEINFKDIQVIVNVPPTIQARQNIVNATANLGQSVTLVCDAEGFPEPTMSWTKDGEQIEQEEDDEKYIFSDDSSQLTIKKVDKNDEAEYICIAENKAGEQDATIHLKVFAKPKITYVENQTAMELEEQVTLTCEASGDPIPSITWRTSTRNISSEEKTLDGHMVVRSHARVSSLTLKSIQYTDAGEYICTASNTIGQDSQSMYLEVQYAPKLQGPVAVYTWEGNQVNITCEVFAYPSATISWFRDGQLLPSSNYSNIKIYNTPSASYLEVTPDSENDFGNYNCTAVNRIGQESLEFILVQADTPSSPSIDQVEPYSSTAQVQFDEPEATGGVPILKYKAEWRAVGEEVWHSKWYDAKEASMEGIVTIVGLKPETTYAVRLAALNGKGLGEISAASEFKTQPVQGEPSAPKLEGQMGEDGNSIKVNLIKQDDGGSPIRHYLVRYRALSSEWKPEIRLPSGSDHVMLKSLDWNAEYEVYVVAENQQGKSKAAHFVFRTSAQPTAIPATLGGNSASYTFVSLLFSAVTLLLLC

SEQ ID NO: 418 - protein, 761 aa, Homo sapiens [sequence omitted]

SEQ ID NO: 419 - protein, 761 aa, Homo sapiens
MLQTKDLIWTLFFLGTAVSLQVDIVPSQGEISVGESKFFLCQVAGDAKDKDISWFSPNGEKLTPNQQRISVVWNDDSSSTLTIYNANIDDAGIYKCVVTGEDGSESEATVNVKIFQKLMFKNAPTPQEFREGEDAVIVCDVVSSLPPTIIWKHKGRDVILKKDVRFIVLSNNYLQIRGIKKTDEGTYRCEGRILARGEINFKDIQVIVNVPPTIQARQNIVNATANLGQSVTLVCDAEGFPEPTMSWTKDGEQIEQEEDDEKYIFSDDSSQLTIKKVDKNDEAEYICIAENKAGEQDATIHLKVFAKPKITYVENQTAMELEEQVTLTCEASGDPIPSITWRTSTRNISSEEKTLDGHMVVRSHARVSSLTLKSIQYTDAGEYICTASNTIGQDSQSMYLEVQYAPKLQGPVAVYTWEGNQVNITCEVFAYPSATISWFRDGQLLPSSNYSNIKIYNTPSASYLEVTPDSENDFGNYNCTAVNRIGQESLEFILVQADTPSSPSIDQVEPYSSTAQVQFDEPEATGGVPILKYKAEWRAVGEEVWHSKWYDAKEASMEGIVTIVGLKPETTYAVRLAALNGKGLGEISAASEFKTQPVHSPPPPASASSSTPVPLSPPDTTWPLPALATTEPAKGEPSAPKLEGQMGEDGNSIKVNLIKQDDGGSPIRHYLVRYRALSSEWKPEIRLPSGSDHVMLKSLDWNAEYEVYVVAENQQGKSKAAHFVFRTSAQPTAIPATLGGNSASYTFVSLLFSAVTLLLLC

SEQ ID NO: 420 - protein, 88 aa, Homo sapiens
MSDILRELLCVSEKAANIARACRQQEALFQLLIEEKKEGEKNKKFAVDFKTLADVLVQEVIKQNMENKFPGLEKNIFGEESNEFTNDW

SEQ ID NO: 421 - protein, 190 aa, Homo sapiens
MSDILRELLCVSEKAANIARACRQQEALFQLLIEEKKEGEKNKKFAVDFKTLADVLVQEVIKQNMENKFPGLEKNIFGEESNEFTNDWGEKITLRLCSTEEETAELLSKVLNGNKVASEALARVVHQDVAFTDPTLDSTEINVPQDILGIWVDPIDSTYQYIKGSADIKSNQGIFPCGLQCVTILIGVYD

SEQ ID NO: 422 - protein, 30 aa, Homo sapiens
MSDILRELLCVSEKAANIARACRQQEALFQ

SEQ ID NO: 423 - protein, 68 aa, Homo sapiens
MSDILRELLCVSEKAANIARACRQQEALFQLLIEEKKEGEKNKKFAVDFKTLADVLVQEVIKQNMENK

SEQ ID NO: 424 - protein, 831 aa, Homo sapiens
MSKKGRSKGEKPEMETDAVQMANEELRAKLTSIQIEFQQEKSKVGKLRERLQEAKLEREQEQRRHTAYISELKAKLHEEKTKELQALREGLIRQHEQEAARTAKIKEGELQRLQATLNVLRDGAADKVKTALLTEAREEARRAFDGERLRLQQEILELKAARKQAEEALSNCMQADKTKAADLRAAYQAHQDEVHRIKRECERDIRRLMDEIKGKDRVILALEKELGVQAGQTQKLLLQKEALDEQLVQVKEAERHHSSPKRELPPGIGDMVELMGVQDQHMDERDVRRFQLKIAELNSVIRKLEDRNTLLADERNELLKRSRETEVQLKPLVEKNKRMNKKNEDLLQSIQRMEEKIKNLTRENVEMKEKLSAQASLKRHTSLNDLSLTRDEQEIEFLRLQVLEQQHVIDDLSLERERLLRSKRHRGKSLKPPKKHVVETFFGFDEESVDSETLSETSYNTDRTDRTPATPEEDLDDATAREEADLRFCQLTREYQALQRAYALLQEQVGGTLDAEREARTREQLQADLLRCQAKIEDLEKLLVEKGQDSKWVEEKQLLIRTNQDLLEKIYRLEMEENQLKNEMQDAKDQNELLEFRVLELEERERRSPAFNLQITTFPENHSSALQLFCHQEGVKDVNVSELMKKLDILGDNGNLRNEEQVAIIQAGTVLALCEKWLKQIEGTEAALTQKMLDLEKEKDLFSRQKGYLEEELDYRKQALDQAYLKIQDLEATLYTALQQEPGRRAGEALSEGQREDLQAAVEKVRRQILRQSREFDSQILRERMELLQQAQQRIRELEDKLEFQKRHLKELEEKFLFLFLFFSLAFILWP

SEQ ID NO: 425 - protein, 646 aa, Homo sapiens
MSKKGRSKGEKPEMETDAVQMANEELRAKLTSIQIEFQQEKSKMDEIKGKDRVILALEKELGVQAGQTQKLLLQKEALDEQLVQVKEAERHHSSPKRELPPGIGDMVELMGVQDQHMDERDVRRFQLKIAELNSVIRKLEDRNTLLADERNELLKRSRETEVQLKPLVEKNKRMNKKNEDLLQSIQRMEEKIKNLTRENVEMKEKLSAQASLKRHTSLNDLSLTRDEQEIEFLRLQVLEQQHVIDDLSLKHVVETFFGFDEESVDSETLSETSYNTDRTDRTPATPEEDLDDATAREEADLRFCQLTREYQALQRAYALLQEQVGGTLDAEREARTREQLQADLLRCQAKIEDLEKLLVEKGQDSKWVEEKQLLIRTNQDLLEKIYRLEMEENQLKNEMQDAKDQNELLEFRVLELEERERRSPAFNLQITTFPENHSSALQLFCHQEGVKDVNVSELMKKLDILGDNGNLRNEEQVAIIQAGTVLALCEKWLKQIEGTEAALTQKMLDLEKEKDLFSRQKGYLEEELDYRKQALDQAYLKIQDLEATLYTALQQEPGRRAGEALSEGQREDLQAAVEKVRRQILRQSREFDSQILRERMELLQQAQQRIRELEDKLEFQKRHLKELEEKFLFLFLFFSLAFILWP

SEQ ID NO: 426 - protein, 66 aa, Homo sapiens
MAAIRKKLVIVGDGACGKTCLLIVFSKDQFPEVYVPTVFENYIADIEVDGKQTGSVTWAESLCLWV

SEQ ID NO: 427 - protein, 66 aa, Homo sapiens; identical to SEQ ID NO: 426

SEQ ID NO: 428 - protein, 66 aa, Homo sapiens; identical to SEQ ID NO: 426

SEQ ID NO: 429 - protein, 500 aa, Homo sapiens
MPPAVGGPVGYTPPDGGWGWAVVIGAFISIGFSYAFPKSITVFFKEIEGIFHATTSEVSWISSIMLAVMYGGGPISSILVNKYGSRIVMIVGGCLSGCGLIAASFCNTVQQLYVCIGVIGGLGLAFNLNPALTMIGKYFYKRRPLANGLAMAGSPVFLCTLAPLNQVFFGIFGWRGSFLILGGLLLNCCVAGALMRPIGPKPTKAGKDKSKASLEKAGKSGVKKDLHDANTDLIGRHPKQEKRSVFQTINQFLDLTLFTHRGFLLYLSGNVIMFFGLFAPLVFLSSYGKSQHYSSEKSAFLLSILAFVDMVARPSMGLVANTKPIRPRIQYFFAASVVANGVCHMLAPLSTTYVGFCVYAGFFGFAFGWLSSVLFETLMDLVGPQRFSSAVGLVTIVECCPVLLGPPLLGRLNDMYGDYKYTYWACGVVLIISGIYLFIGMGINYRLLAKEQKANEQKKESKEEETSIDVAGKPNEVTKAAESPDQKDTDGGPKEEESPV

SEQ ID NO: 430 - protein, 215 aa, Homo sapiens
MPPAVGGPVGYTPPDGGWGWAVVIGAFISIGFSYAFPKSITVFFKEIEGIFHATTSEVSWISSIMLAVMYGGGPISSILVNKYGSRIVMIVGGCLSGCGLIAASFCNTVQQLYVCIGVIGGLGLAFNLNPALTMIGKYFYKRRPLANGLAMAGSPVFLCTLAPLNQVFFGIFGWRGSFLILGGLLLNCCVAGALMRPIGPKPTKAGKDKSKASLE

SEQ ID NO: 431 - protein, 296 aa, Homo sapiens
MPPAVGGPVGYTPPDGGWGWAVVIGAFISIGFSYAFPKSITVFFKEIEGIFHATTSEVSWISSIMLAVMYGGGPISSILVNKYGSRIVMIVGGCLSGCGLIAASFCNTVQQLYVCIGVIGGLGLAFNLNPALTMIGKYFYKRRPLANGLAMAGSPVFLCTLAPLNQVFFGIFGWRGSFLILGGLLLNCCVAGALMRPIGPKPTKAGKDKSKASLEKAGKSGVKKDLHDANTDLIGRHPKQEKRSVFQTINQFLDLTLFTHRGFLLYLSGNVIMFFGLFAPLVFLSSYGKSQHYSSE

SEQ ID NO: 432 - protein, 456 aa, Homo sapiens
MPPAVGGPVGYTPPDGGWGWAVVIGAFISIGFSYAFPKSITVFFKEIEGIFHATTSEVSWISSIMLAVMYGGGPISSILVNKYGSRIVMIVGGCLSGCGLIAASFCNTVQQLYVCIGVIGGLGLAFNLNPALTMIGKYFYKRRPLANGLAMAGSPVFLCTLAPLNQVFFGIFGWRGSFLILGGLLLNCCVAGALMRPIGPKPTKAGKDKSKASLEKAGKSGVKKDLHDANTDLIGRHPKQEKRSVFQTINQFLDLTLFTHRGFLLYLSGNVIMFFGLFAPLVFLSSYGKSQHYSSEKSAFLLSILAFVDMVARPSMGLVANTKPIRPRIQYFFAASVVANGVCHMLAPLSTTYVGFCVYAGFFGFAFGWLSSVLFETLMDLVGPQRFSSAVGLVTIVECCPVLLGPPLLGRLNDMYGDYKYTYWACGVVLIISGIYLFIGMGINYRLLAKEQKANE

SEQ ID NO: 433 - protein, 500 aa, Homo sapiens; identical to SEQ ID NO: 429

SEQ ID NO: 434 - protein, 109 aa, Homo sapiens
MKFISTSLLLMLLVSSLSPVQGVLEVYYTSLRCRCVQESSVFIPRRFIDRIQILPRGNGCPRKEIIVWKKNKSIVCVDPQAEWIQRMMEVLRKRSSSTLPVPVFKRKIP

SEQ ID NO: 435 - protein, 729 aa, Homo sapiens
MDDLTLLDLLECPVCFEKLDVTAKVLPCQHTFCKPCLQRVFKAHKELRCPECRTPVFSNIEALPANLLLVRLLDGVRSGQSSGRGGSFRRPGTMTLQDGRKSRTNPRRLQASPFRLVPNVRIHMDGVPRAKALCNYRGQNPGDLRFNKGDIILLRRQLDENWYQGEINGISGNFPASSVEVIKQLPQPPPLCRALYNFDLRGKDKSENQDCLTFLKDDIITVISRVDENWAEGKLGDKVGIFPILFVEPNLTARHLLEKNKGRQSSRTKNLSLVSSSSRGNTSTLRRGPGSRRKVPGQFSITTALNTLNRMVHSPSGRHMVEISTPVLISSSNPSVITQPMEKADVPSSCVGQVSTYHPAPVSPGHSTAVVSLPGSQQHLSANMFVALHSYSAHGPDELDLQKGEGVRVLGKCQDGWLRGVSLVTGRVGIFPNNYVIPIFRKTSSFPDSRSPGLYTTWTLSTSSVSSQGSISEGDPRQSRPFKSVFVPTAIVNPVRSTAGPGTLGQGSLRKGRSSMRKNGSLQRPLQSGIPTLVVGSLRRSPTMVLRPQQFQFYQPQGIPSSPSAVVVEMGSKPALTGEPALTCISRGSEAWIHSAASSLIMEDKEIPIKSEPLPKPPASAPPSILVKPENSRNGIEKQVKTVRFQNYSPPPTKHYTSHPTSGKPEQPATLKASQPEAASLGPEMTVLFAHRSGCHSGQQTDLRRKSALGKATTLVSTASGTQTVFPSK

SEQ ID NO: 436 - protein, 729 aa, Homo sapiens; identical to SEQ ID NO: 435

SEQ ID NO: 437 - protein, 398 aa, Homo sapiens
MSGSSLPSALALSLLLVSGSLLPGPGAAQNAGFVKSPMSETKLTGDAFELYCDVVGSPTPEIQWWYAEVNRAESFRQLWDGARKRRVTVNTAYGSNGVSVLRITRLTLEDSGTYECRASNDPKRNDLRQNPSITWIRAQATISVLQKPRIVTSEEVIIRDSPVLPVTLQCNLTSSSHTLTYSYWTKNGVELSATRKNASNMEYRINKPRAEDSGEYHCVYHFVSAPKANATIEVKAAPDITGHKRSENKNEGQDATMYCKSVGYPHPDWIWRKKENGMPMDIVNTSGRFFIINKENYTELNIVNLQITEDPGEYECNATNAIGSASVVTVLRVRSHLAPLWPFLGILAEIIILVVIIVVYEKRKRPDEVPDDDEPAGPMKTNSTNNHKDKNLRQRNTN

SEQ ID NO: 438 - protein, 282 aa, Homo sapiens
MSGSSLPSALALSLLLVSGSLLPGPGAAQNEPRIVTSEEVIIRDSPVLPVTLQCNLTSSSHTLTYSYWTKNGVELSATRKNASNMEYRINKPRAEDSGEYHCVYHFVSAPKANATIEVKAAPDITGHKRSENKNEGQDATMYCKSVGYPHPDWIWRKKENGMPMDIVNTSGRFFIINKENYTELNIVNLQITEDPGEYECNATNAIGSASVVTVLRVRSHLAPLWPFLGILAEIIILVVIIVVYEKRKRPDEVPDDDEPAGPMKTNSTNNHKDKNLRQRNTN

SEQ ID NO: 439 - protein, 278 aa, Homo sapiens
MSGSSLPSALALSLLLVSGSLLPGPGAAQNEPRIVTSEEVIIRDSPVLPVTLQCNLTSSSHTLTYSYWTKNGVELSATRKNASNMEYRINKPRAEDSGEYHCVYHFVSAPKANATIEVKAAPDITGHKRSENKNEGQDATMYCKSVGYPHPDWIWRKKENGMPMDIVNTSGRFFIINKENYTELNIVNLQITEDPGEYECNATNAIGSASVVTVLRVRSHLAPLWPFLGILAEIIILVVIIVVYEKRKRPDEVPDAGPMKTNSTNNHKDKNLRQRNTN

SEQ ID NO: 440 - protein, 394 aa, Homo sapiens
MSGSSLPSALALSLLLVSGSLLPGPGAAQNAGFVKSPMSETKLTGDAFELYCDVVGSPTPEIQWWYAEVNRAESFRQLWDGARKRRVTVNTAYGSNGVSVLRITRLTLEDSGTYECRASNDPKRNDLRQNPSITWIRAQATISVLQKPRIVTSEEVIIRDSPVLPVTLQCNLTSSSHTLTYSYWTKNGVELSATRKNASNMEYRINKPRAEDSGEYHCVYHFVSAPKANATIEVKAAPDITGHKRSENKNEGQDATMYCKSVGYPHPDWIWRKKENGMPMDIVNTSGRFFIINKENYTELNIVNLQITEDPGEYECNATNAIGSASVVTVLRVRSHLAPLWPFLGILAEIIILVVIIVVYEKRKRPDEVPDAGPMKTNSTNNHKDKNLRQRNTN

SEQ ID NO: 441 - protein, 184 aa, Homo sapiens
MSGSSLPSALALSLLLVSGSLLPGPGAAQNAAPDITGHKRSENKNEGQDATMYCKSVGYPHPDWIWRKKENGMPMDIVNTSGRFFIINKENYTELNIVNLQITEDPGEYECNATNAIGSASVVTVLRVRSHLAPLWPFLGILAEIIILVVIIVVYEKRKRPDEVPDDDEPAGPMKTNSTNNHKD

SEQ ID NO: 442 - protein, 518 aa, Homo sapiens
  misc_feature (1)..(1): Xaa can be any naturally occurring amino acid
XRKWSRQFLLSFWCTVCSAHQGTIFLSLKIQFADQKQEFNKRPTKIGRRSLSRSISQSSTDSYSSAASYTDSSDDETSPRDKQQKNSKGSSDFCVKNIKQAEFGRREIEIAEQEMPALMALRKRAQGEKPLAGAKIVGCTHITAQTAVLMETLGALGAQCRWAACNIYSTLNEVAAALAESGFPVFAWKGESEDDFWWCIDRCVNVEGWQPNMILDDGGDLTHWIYKKYPNMFKKIKGIVEESVTGVHRLYQLSKAGKLCVPAMNVNDSVTKQKFDNLYCCRESILDGLKRTTDMMFGGKQVVVCGYGEVGKGCCAALKAMGSIVYVTEIDPICALQACMDGFRLVKLNEVIRQVDIVITCTGNKNVVTREHLDRMKNSCIVCNMGHSNTEIDVASLRTPELTWERVRSQVDHVIWPDGKRIVLLAEGRLLNLSCSTVPTFVLSITATTQALALIELYNAPEGRYKQDVYLLPKKMDEYVASLHLPTFDAHLTELTDEQAKYLGLNKNGPFKPNYYRY

SEQ ID NO: 443 - protein, 386 aa, Homo sapiens [sequence omitted]

SEQ ID NO: 444 - protein, 143 aa, Homo sapiens
MTVVMAVCSLPLTIRCFTQAVAPDSSSEMGDLLAFRFYAFNPILDPWVFILFRKAVFQRLKLWVCCLCLGPAHGDSQTPLSQLASGRRDPRAPSAPVGKEGSCVPLSAWGEGQVEPLPPTQQSSGSAVGTSSKAEASVACSLC

SEQ ID NO: 445 - protein, 296 aa, Homo sapiens
MADSCRNLTYVRGSVGPATSTLMFVAGVVGNGLALGILSARRPARPSAFAVLVTGLAATDLLGTSFLSPAVFVAYARNSSLLGLARGGPALCDAFAFAMTFFGLASMLILFAMAVERCLALSHPYLYAQLDGPRCARLALPAIYAFCVLFCALPLLGLGQHQQYCPGSWCFLRMRWAQPGGAAFSLAYAGLVALLVAAIFLCNGSVTLSLCRMYRQQKRHQGSLGPRPRTGEDEVDHLILLALMTVVMAVCSLPLTHVERPRQDRMRWLTPVIPALWEAEAGGSFEVRSSRPVWPT

SEQ ID NO: 446 - protein, 115 aa, Homo sapiens
MGDLLAFRFYAFNPILDPWVFILFRKAVFQRLKLWVCCLCLGPAHGDSQTPLSQLASGRRDPRAPSAPVGKEGSCVPLSAWGEGQVEPLPPTQQSSGSAVGTSSKAEASVACSLC

SEQ ID NO: 447 - protein, 174 aa, Homo sapiens
MYRQQKRHQGSLGPRPRTGEDEVDHLILLALMTVVMAVCSLPLTIRCFTQAVAPDSSSEMGDLLAFRFYAFNPILDPWVFILFRKAVFQRLKLWVCCLCLGPAHGDSQTPLSQLASGRRDPRAPSAPVGKEGSCVPLSAWGEGQVEPLPPTQQSSGSAVGTSSKAEASVACSLC

SEQ ID NO: 448 - protein, 454 aa, Homo sapiens
MGENDPPAVEAPFSFRSLFGLDDLKISPVAPDADAVAAQILSLLPLKFFPIIVIGIIALILALAIGLGIHFDCSGKYRCRSSFKCIELIARCDGVSDCKDGEDEYRCVRVGGQNAVLQVFTAASWKTMCSDDWKGHYANVACAQLGFPSYVSSDNLRVSSLEGQFREEFVSIDHLLPDDKVTALHHSVYVREGCASGHVVTLQCTACGHRRGYSSRIVGGNMSLLSQWPWQASLQFQGYHLCGGSVITPLWIITAAHCVYDLYLPKSWTIQVGLVSLLDNPAPSHLVEKIVYHSKYKPKRLGNDIALMKLAGPLTFNEMIQPVCLPNSEENFPDGKVCWTSGWGATEDGAGDASPVLNHAAVPLISNKICNHRDVYGGIISPSMLCAGYLTGGVDSCQGDSGGPLVCQERRLWKLVGATSFGIGCAEVNKPGVYTRVTSFLDWIHEQMERDLKT

SEQ ID NO: 449 - protein, 344 aa, Homo sapiens
MGENDPPAVEAPFSFRSLFGLDDLKISPVAPDADAVAAQILSLLPLKFFPIIVIGIIALILALAIGLGIHFDCSGKYRCRSSFKCIELIARCDGVSDCKDGEDEYRCVRVGGQNAVLQVFTAASWKTMCSDDWKGHYANVACAQLGFPSYVSSDNLRVSSLEGQFREEFVSIDHLLPDDKVTALHHSVYVREGCASGHVVTLQCTACGHRRGYSSRIVGGNMSLLSQWPWQASLQFQGYHLCGGSVITPLWIITAAHCVYDLYLPKSWTIQVGLVSLLDNPAPSHLVEKIVYHSKYKPKRLGNDIALMKLAGPLTFNGTSGSLCGSAALPLFQEDLQLLIEAFL

SEQ ID NO: 450 - protein, 451 aa, Homo sapiens
MGENDPPAVEAPFSFRSLFGLDDLKISPVAPDAVAAQILSLLPLKFFPIIVIGIIALILALAIGLGIHFDCSGKYRCRSSFKCIELIARCDGVSDCKDGEDEYRCVRVGGQNAVLQVFTAASWKTMCSDDWKGHYANVACAQLGFPSYVSSDNLRVSSLEGQFREEFVSIDHLLPDDKVTALHHSVYVREGCASGHVVTLQCTACGHRRGYSSRIVGGNMSLLSQWPWQASLQFQGYHLCGGSVITPLWIITAAHCVYDLYLPKSWTIQVGLVSLLDNPAPSHLVEKIVYHSKYKPKRLGNDIALMKLAGPLTFNEMIQPVCLPNSEENFPDGKVCWTSGWGATEDGGDASPVLNHAAVPLISNKICNHRDVYGGIISPSMLCAGYLTGGVDSCQGDSGGPLVCQERRLWKLVGATSFGIGCAEVNKPGVYTRVTSFLDWIHEQMERDLKT

SEQ ID NO: 451 - protein, 453 aa, Homo sapiens
MGENDPPAVEAPFSFRSLFGLDDLKISPVAPDADAVAAQILSLLPLKFFPIIVIGIIALILALAIGLGIHFDCSGKYRCRSSFKCIELIARCDGVSDCKDGEDEYRCVRVGGQNAVLQVFTAASWKTMCSDDWKGHYANVACAQLGFPSYVSSDNLRVSSLEGQFREEFVSIDHLLPDDKVTALHHSVYVREGCASGHVVTLQCTACGHRRGYSSRIVGGNMSLLSQWPWQASLQFQGYHLCGGSVITPLWIITAAHCVYDLYLPKSWTIQVGLVSLLDNPAPSHLVEKIVYHSKYKPKRLGNDIALMKLAGPLTFNEMIQPVCLPNSEENFPDGKVCWTSGWGATEDGGDASPVLNHAAVPLISNKICNHRDVYGGIISPSMLCAGYLTGGVDSCQGDSGGPLVCQERRLWKLVGATSFGIGCAEVNKPGVYTRVTSFLDWIHEQMERDLKT

SEQ ID NO: 452 - protein, 734 aa, Homo sapiens
MLLWLLLLILTPGREQSGVAPKAVLLLNPPWSTAFKGEKVALICSSISHSLAQGDTYWYHDEKLLKIKHDKIQITEPGNYQCKTRGSSLSDAVHVEFSPDWLILQALHPVFEGDNVILRCQGKDNKNTHQKVYYKDGKQLPNSYNLEKITVNSVSRDNSKYHCTAYRKFYILDIEVTSKPLNIQVQELFLHPVLRASSSTPIEGSPMTLTCETQLSPQRPDVQLQFSLFRDSQTLGLGWSRSPRLQIPAMWTEDSGSYWCEVETVTHSIKKRSLRSQIRVQRVPVSNVNLEIRPTGGQLIEGENMVLICSVAQGSGTVTFSWHKEGRVRSLGRKTQRSLLAELHVLTVKESDAGRYYCAADNVHSPILSTWIRVTVRIPVSHPVLTFRAPRAHTVVGDLLELHCESLRGSPPILYRFYHEDVTLGNSSAPSGGGASFNLSLTAEHSGNYSCDADNGLGAQHSHGVSLRVTVPVSRPVLTLRAPGAQAVVGDLLELHCESLRGSFPILYWFYHEDDTLGNISAHSGGGASFNLSLTTEHSGNYSCEADNGLGAQHSKVVTLNVTGTSRNRTGLTAAGITGLVLSILVLAAAAALLHYARARRKPGGLSATGTSSHSPSECQEPSSSRPSRIDPQEPTHSKPLAPMELEPMYSNVNPGDSNPIYSQIWSIQHTKENSANCPMMHQEHEELTVLYSELKKTHPDDSAGEASSRGRAHEEDDEENYENVPRVLLASDH

SEQ ID NO: 453 - protein, 742 aa, Homo sapiens
MLLWLLLLILTPGREQSGVAPKAVLLLNPPWSTAFKGEKVALICSSISHSLAQGDTYWYHDEKLLKIKHDKIQITEPGNYQCKTRGSSLSDAVHVEFSPDWLILQALHPVFEGDNVILRCQGKDNKNTHQKVYYKDGKQLPNSYNLEKITVNSVSRDNSKYHCTAYRKFYILDIEVTSKPLNIQVQELFLHPVLRASSSTPIEGSPMTLTCETQLSPQRPDVQLQFSLFRDSQTLGLGWSRSPRLQIPAMWTEDSGSYWCEVETVTHSIKKRSLRSQIRVQRVPVSNVNLEIRPTGGQLIEGENMVLICSVAQGSGTVTFSWHKEGRVRSLGRKTQRSLLAELHVLTVKESDAGRYYCAADNVHSPILSTWIRVTVRIPVSHPVLTFRAPRAHTVVGDLLELHCESLRGSPPILYRFYHEDVTLGNSSAPSGGGASFNLSLTAEHSGNYSCDADNGLGAQHSHGVSLRVTVPVSRPVLTLRAPGAQAVVGDLLELHCESLRGSFPILYWFYHEDDTLGNISAHSGGGASFNLSLTTEHSGNYSCEADNGLGAQHSKVVTLNVTGTSRNRTGLTAAGITGLVLSILVLAAAAALLHYARARRKPGGLSATGTSSHSPSECQEPSSSRPSRIDPQEPTHSKPLAPMELEPMYSNVNPGDSNPIYSQIWSIQHTKENSANCPMMHQEHEELTVLYSELKKTHPDDSAGEASSRGRAHEEDDEENYENILNPRKNKVQDFPCLCNT

SEQ ID NO: 454 - protein, 639 aa, Homo sapiens
MLLWLLLLILTPGREQSGVAPKAVLLLNPPWSTAFKGEKVALICSSISHSLAQGDTYWYHDEKLLKIKHDKIQITEPGNYQCKTRGSSLSDAVHVEFSPDWLILQALHPVFEGDNVILRCQGKDNKNTHQKVYYKDGKQLPNSYNLEKITVNSVSRDNSKYHCTAYRKFYILDIEVTSKPLNIQVQGVPVSNVNLEIRPTGGQLIEGENMVLICSVAQGSGTVTFSWHKEGRVRSLGRKTQRSLLAELHVLTVKESDAGRYYCAADNVHSPILSTWIRVTVRIPVSHPVLTFRAPRAHTVVGDLLELHCESLRGSPPILYRFYHEDVTLGNSSAPSGGGASFNLSLTAEHSGNYSCDADNGLGAQHSHGVSLRVTVPVSRPVLTLRAPGAQAVVGDLLELHCESLRGSFPILYWFYHEDDTLGNISAHSGGGASFNLSLTTEHSGNYSCEADNGLGAQHSKVVTLNVTGTSRNRTGLTAAGITGLVLSILVLAAAAALLHYARARRKPGGLSATGTSSHSPSECQEPSSSRPSRIDPQEPTHSKPLAPMELEPMYSNVNPGDSNPIYSQIWSIQHTKENSANCPMMHQEHEELTVLYSELKKTHPDDSAGEASSRGRAHEEDDEENYENVPRVLLASDH

SEQ ID NO: 455 - protein, 734 aa, Homo sapiens; identical to SEQ ID NO: 452

SEQ ID NO: 456 - protein, 740 aa, Homo sapiens
MLLWLLLLILTPGREQSGVAPKAVLLLNPPWSTAFKGEKVALICSSISHSLAQGDTYWYHDEKLLKIKHDKIQITEPGNYQCKTRGSSLSDAVHVEFSPDWLILQALHPVFEGDNVILRCQGKDNKNTHQKVYYKDGKQLPNSYNLEKITVNSVSRDNSKYHCTAYRKFYILDIEVTSKPLNIQVQELFLHPVLRASSSTPIEGSPMTLTCETQLSPQRPDVQLQFSLFRDSQTLGLGWSRSPRLQIPAMWTEDSGSYWCEVETVTHSIKKRSLRSQIRVQRVPVSNVNLEIRPTGGQLIEGENMVLICSVAQGSGTVTFSWHKEGRVRSLGRKTQRSLLAELHVLTVKESDAGRYYCAADNVHSPILSTWIRVTVRTLLSPSVPVSHPVLTFRAPRAHTVVGDLLELHCESLRGSPPILYRFYHEDVTLGNSSAPSGGGASFNLSLTAEHSGNYSCDADNGLGAQHSHGVSLRVTVPVSRPVLTLRAPGAQAVVGDLLELHCESLRGSFPILYWFYHEDDTLGNISAHSGGGASFNLSLTTEHSGNYSCEADNGLGAQHSKVVTLNVTGTSRNRTGLTAAGITGLVLSILVLAAAAALLHYARARRKPGGLSATGTSSHSPSECQEPSSSRPSRIDPQEPTHSKPLAPMELEPMYSNVNPGDSNPIYSQIWSIQHTKENSANCPMMHQEHEELTVLYSELKKTHPDDSAGEASSRGRAHEEDDEENYENVPRVLLASDH

SEQ ID NO: 457 - protein, 256 aa, Homo sapiens
MLLWLLLLILTPGREQSGVAPKAVLLLNPPWSTAFKGEKVALICSSISHSLAQGDTYWYHDEKLLKIKHDKIQITEPGNYQCKTRGSSLSDAVHVEFSPDWLILQALHPVFEGDNVILRCQGKDNKNTHQKVYYKDGKQLPNSYNLEKITVNSVSRDNSKYHCTAYRKFYILDIEVTSKPLNIQVQELFLHPVLRASSSTPIEGSPMTLTCETQLSPQRPDVQLQFSLFRDSQTLGLGWSRSPRLQIPAMWTEDSG

SEQ ID NO: 458 - protein, 234 aa, Homo sapiens
MAFLAGPRLLDWASSPPHLQFNKFVLTGYRPASSGSGCLRSLFYLHNELGNIYTHGSVLYHLFMCHQGGSAVYARLLALDMCGVCLVNTLGALPIIHCTLACRPWLRPAALVGYTVLSGVAGWRALTAPSTSARLRAFGWQAAARLLVFGARGVGLGSGAPGSLPCYLRMDALALLGGLVNVARLPERWGPGRFDYWGNSHQIMHLLSVGSILQLHAGVVPDLLWAAHHACPRD

SEQ ID NO: 459 - protein, 273 aa, Homo sapiens
MAFLAGPRLLDWASSPPHLQFNKFVLTGYRPASSGSGCLRSLFYLHNELGNIYTHGLALLGFLVLVPMTMPWGQLGKDGWLGGTHCVACLAPPAGSVLYHLFMCHQGGSAVYARLLALDMCGVCLVNTLGALPIIHCTLACRPWLRPAALVGYTVLSGVAGWRALTAPSTSARLRAFGWQAAARLLVFGARGVGLGSGAPGSLPCYLRMDALALLGGLVNVARLPERWGPGRFDYWGNSHQIMHLLSVGSILQLHAGVVPDLLWAAHHACPRD

SEQ ID NO: 460 - protein, 199 aa, Homo sapiens
MAFLAGPRLLDWASSPPHLQFNKFVLTGYRPASSGSGCLRSLFYLHNELGNIYTHGALPIIHCTLACRPWLRPAALVGYTVLSGVAGWRALTAPSTSARLRAFGWQAAARLLVFGARGVGLGSGAPGSLPCYLRMDALALLGGLVNVARLPERWGPGRFDYWGNSHQIMHLLSVGSILQLHAGVVPDLLWAAHHACPRD

SEQ ID NO: 461 - protein, 206 aa, Homo sapiens
MTMPWGQLGKDGWLGGTHCVACLAPPAGSVLYHLFMCHQGGSAVYARLLALDMCGVCLVNTLGALPIIHCTLACRPWLRPAALVGYTVLSGVAGWRALTAPSTSARLRAFGWQAAARLLVFGARGVGLGSGAPGSLPCYLRMDALALLGGLVNVARLPERWGPGRFDYWGNSHQIMHLLSVGSILQLHAGVVPDLLWAAHHACPRD

SEQ ID NO: 462 - protein, 206 aa, Homo sapiens; identical to SEQ ID NO: 461

SEQ ID NO: 463 - protein, 208 aa, Homo sapiens
MGAQGAQESIKAMWRVPGTTRRPVTGESPGMHRPEAMLLLLTLALLGGPTWAGKMYGPGGGKYFSTTEDYDHEITGLRVSVGLLLVKSVQVKLGDSWDVKLGALGGNTQEVTLQPGEYITKVFVAFQAFLRGMVMYTSKDRYFYFGKLDGQISSAYPSQEGQVLVGIYGQYQLLGIKSIGFEWNYPLEEPTTEPPVNLTYSANSPVGR

SEQ ID NO: 464 - protein, 95 aa, Homo sapiens
  misc_feature (1)..(1): Xaa can be any naturally occurring amino acid
XAQGAQESIKAMWRVPGTTRRPVTGESPGMHRPEAMLLLLTLALLGGPTWAGKMYGPGGGKYFSTTEDYDHEITGLRVSVGLLLVKRFLEGVIYE

SEQ ID NO: 465 - protein, 69 aa, Homo sapiens
  misc_feature (1)..(1): Xaa can be any naturally occurring amino acid
XRRPVTGESPGMHRPEAMLLLLTLALLGGPTWAGKMYGPGGGKYFSTTEDYDHEITGLRVSVGLLLVKR

SEQ ID NO: 466 - protein, 178 aa, Homo sapiens
MHRPEAMLLLLTLALLGGPTWAGKMYGPGGGKYFSTTEDYDHEITGLRVSVGLLLVKSVQVKLGDSWDVKLGALGGNTQEVTLQPGEYITKVFVAFQAFLRGMVMYTSKDRYFYFGKLDGQISSAYPSQEGQVLVGIYGQYQLLGIKSIGFEWNYPLEEPTTEPPVNLTYSANSPVGR

SEQ ID NO: 467 - protein, 399 aa, Homo sapiens
MAELLRSLQDSQLVARFQRRCGLFPAPDEGPRENGADPTERAARVPGVEHLPAANGKGGEAPANGLRRAAAPEAYVQKYVVKNYFYYYLFQFSAALGQEVFYITFLPFTHWNIDPYLSRRLIIIWVLVMYIGQVAKDVLKWPRPSSPPVVKLEKRLIAEYGMPSTHAMAATAIAFTLLISTMDRYQYPFVLGLVMAVVFSTLVCLSRLYTGMHTVLDVLGGVLITALLIVLTYPAWTFIDCLDSASPLFPVCVIVVPFFLCYNYPVSDYYSPTRADTTTILAAGAGVTIGFWINHFFQLVSKPAESLPVIQNIPPLTTYMLVLGLTKFAVGIVLILLVRQLVQNLSLQVLYSWFKVVTRNKEARRRLEIEVPYKFVTYTSVGICATTFVPMLHRFLGLP

SEQ ID NO: 468 - protein, 128 aa, Homo sapiens
MDVYGTTKAIELLDPTASRLPTPMPWDLSNKAVPEPKGFGPKDLALPTGNLKATWHLCLREHLPTLHTRRGVCHLLLSRCQHPPCALRPHILLQILCLAGLQRYGQVPCVPLADRGGSPCAGPSCSEG

SEQ ID NO: 469 - protein, 104 aa, Homo sapiens
MDVYGTTKAIELLDPTASRLPTPMPWDLSNKAVPEPKATPGEECAICFYHAANTRLVPCGHTYFCRYCAWRVFSDTAKCPVCRWQIEAVAPAQGPPALRVEEGS

SEQ ID NO: 470 - protein, 83 aa, Homo sapiens
MAPGCKIMKVMPSKFLCEFVLLQKDLGQLMESRTYAYLCCPPRVSGCTPTLSPRPSRLIMLQMWIPLRNLYSQLWLKALWSLA

SEQ ID NO: 471 - protein, 438 aa, Homo sapiens
MPCTCTWRNWRQWIRPLVAVIYLVSIVVAVPLCVWELQKLEVGIHTKAWFIAGIFLLLTIPISLWVILQHLVHYTQPELQKPIIRILWMVPIYSLDSWIALKYPGIAIYVDTCRECYEAYVIYNFMGFLTNYLTNRYPNLVLILEAKDQQKHFPPLCCCPPWAMGEVLLFRCKLGVLQYTVVRPFTTIVALICELLGIYDEGNFSFSNAWTYLVIINNMSQLFAMYCLLLFYKVLKEELSPIQPVGKFLCVKLVVFVSFWQAVVIALLVKVGVISEKHTWEWQTVEAVATGLQDFIICIEMFLAAIAHHYTFSYKPYVQEAEEGSCFDSFLAMWDVSDIRDDISEQVRHVGRTVRGHPRKKLFPEDQDQNEHTSLLSSSSQDAISIASSMPPSPMGHYQGFGHTVTPQTTPTTAKISDEILSDTIGEKKEPSDKSVDS

SEQ ID NO: 472 - protein, 72 aa, Homo sapiens
LGIYDEGNFSFSNAWTYLVIINNMSQLFAMYCLLLFYKVLKEELSPIQPVGKFLCVKLVVFVSFCIRGNGKL

SEQ ID NO: 473 - protein, 261 aa, Homo sapiens
MPCTCTWRNWRQWIRPLVAVIYLVSIVVAVPLCVWELQKLEVGIHTKAWFIAGIFLLLTIPISLWVILQHLVHYTQPELQKPIIRILWMVPIYSLDSWIALKYPGIAIYVDTCRECYEAYVIYNFMGFLTNYLTNRYPNLVLILEAKDQQKHFPPLCCCPPWAMGEVLLFRCKLGVLQYTVVRPFTTIVALICELLGIYDEGNFSFSNAWTYLVIINNMSQLFAMYCLLLFYKVLKEELSPIQPVGKFLCVKLVVFVSFWP

SEQ ID NO: 474 - protein, 115 aa, Homo sapiens
MLWFQGNSMQLARSSFGLFLRNCSASKTTLPVLTLFTKDPCPLCDEAKEVLKPYENRFILQEVNITLPENSVWYERYKFDIPVFHLNGQFLMMHRVNTSKLEKQLLKLEQQSTGG

SEQ ID NO: 475 - protein, 55 aa, Homo sapiens
MLWFQGNSMQLARSSFGLFLRNCSASKTTLPVLTLFTKEFLSTRSLFACCHPCKM

SEQ ID NO: 476 - protein, 59 aa, Homo sapiens
MLWFQGNSMQLARSSFGLFLRNCSASKTTLPVLTLFTKDPCPLCDEAKEVLKPYENRVI

SEQ ID NO: 477 - protein, 138 aa, Homo sapiens
MLWFQGNSMQLARSSFGLFLRNCSASKTTLPVLTLFTKDPCPLCDEAKEVLKPYENRQPYKDQKLPGTRRRRSPSSPSHPHMASQSGKRYNLTLNQVLSFDYDMGLDAPKTISSDCGAFYCLRMFKSPDMTCCFYPKQ

SEQ ID NO: 478 - protein, 57 aa, Homo sapiens
KTTLPVLTLFTKDPCPLCDEAKEVLKPYENRFLMMHRVNTSKLEKQLLKLEQQSTGG

SEQ ID NO: 479 - protein, 138 aa, Homo sapiens; identical to SEQ ID NO: 477

SEQ ID NO: 480 - protein, 89 aa, Homo sapiens
MLWFQGNSMQLARSSFGLFLRNCSASKTTLPVLTLFTKDPCPLCDEAKEVLKPYENRRSTSQSLGNAIYRKKVLHSCCCPGGLNFLMKE

SEQ ID NO: 481 - protein, 215 aa, Homo sapiens
MKDYDELLKYYELHETIGTGGFAKVKLACHILTGEMVAIKIMDKNTLGSDLPRIKTEIEALKNLRHQHICQLYHVLETANKIFMVLEENLLFDEYHKLKLIDFGLCAKPKGNKDYHLQTCCGSLAYAAPELIQGKSYLGSEADVWSMGILLYVLMCGFLPFDDDNVMALYKKIMRGKYDVPKWLSPSSILLLQQMLQVDPKKRISMKNLLNHPWI

SEQ ID NO: 482 - protein, 580 aa, Homo sapiens
MMNFSNIMNYMKLLGQYCPGGELFDYIISQDRLSEEETRVVFRQIVSAVAYVHSQGYAHRDLKPENLLFDEYHKLKLIDFGLCAKPKGNKDYHLQTCCGSLAYAAPELIQGKSYLGSEADVWSMGILLYVLMCGFLPFDDDNVMALYKKIMRGKYDVPKWLSPSSILLLQQMLQVDPKKRISMKNLLNHPWIMQDYNYPVEWQSKNPFIHLDDDCVTELSVHHRNNRQTMEDLISLWQYDHLTATYLLLLAKKARGKPVRLRLSSFSCGQASATPFTDIKSNNWSLEDVTASDKNYVAGLIDYDWCEDDLSTGAATPRTSQFTKYWTESNGVESKSLTPALCRTPANKLKNKENVYTPKSAVKNEEYFMFPEPKTPVNKNQHKREILTTPNRYTTPSKARNQCLKETPIKIPVNSTGTDKLMTGVISPERRCRSVELDLNQAHMEETPKRKGAKVFGSLERGLDKVITVLTRSKRKGSARDGPRRLKLHYNVTTTRLVNPDQLLNEIMSILPKKHVDFVQKGYTLKCQTQSDFGKVTMQFELEVCQLQKPDVVGIRRQRLKGDAWVYKRLVEDILSSCKV

SEQ ID NO: 483 - protein, 520 aa, Homo sapiens
MVLEENLLFDEYHKLKLIDFGLCAKPKGNKDYHLQTCCGSLAYAAPELIQGKSYLGSEADVWSMGILLYVLMCGFLPFDDDNVMALYKKIMRGKYDVPKWLSPSSILLLQQMLQVDPKKRISMKNLLNHPWIMQDYNYPVEWQSKNPFIHLDDDCVTELSVHHRNNRQTMEDLISLWQYDHLTATYLLLLAKKARGKPVRLRLSSFSCGQASATPFTDIKSNNWSLEDVTASDKNYVAGLIDYDWCEDDLSTGAATPRTSQFTKYWTESNGVESKSLTPALCRTPANKLKNKENVYTPKSAVKNEEYFMFPEPKTPVNKNQHKREILTTPNRYTTPSKARNQCLKETPIKIPVNSTGTDKLMTGVISPERRCRSVELDLNQAHMEETPKRKGAKVFGSLERGLDKVITVLTRSKRKGSARDGPRRLKLHYNVTTTRLVNPDQLLNEIMSILPKKHVDFVQKGYTLKCQTQSDFGKVTMQFELEVCQLQKPDVVGIRRQRLKGDAWVYKRLVEDILSSCKV

SEQ ID NO: 484 - protein, 619 aa, Homo sapiens
MMNFSNIMNYMKLLGQSDLPRIKTEIEALKNLRHQHICQLYHVLETANKIFMVLEYCPGGELFDYIISQDRLSEEETRVVFRQIVSAVAYVHSQGYAHRDLKPENLLFDEYHKLKLIDFGLCAKPKGNKDYHLQTCCGSLAYAAPELIQGKSYLGSEADVWSMGILLYVLMCGFLPFDDDNVMALYKKIMRGKYDVPKWLSPSSILLLQQMLQVDPKKRISMKNLLNHPWIMQDYNYPVEWQSKNPFIHLDDDCVTELSVHHRNNRQTMEDLISLWQYDHLTATYLLLLAKKARGKPVRLRLSSFSCGQASATPFTDIKSNNWSLEDVTASDKNYVAGLIDYDWCEDDLSTGAATPRTSQFTKYWTESNGVESKSLTPALCRTPANKLKNKENVYTPKSAVKNEEYFMFPEPKTPVNKNQHKREILTTPNRYTTPSKARNQCLKETPIKIPVNSTGTDKLMTGVISPERRCRSVELDLNQAHMEETPKRKGAKVFGSLERGLDKVITVLTRSKRKGSARDGPRRLKLHYNVTTTRLVNPDQLLNEIMSILPKKHVDFVQKGYTLKCQTQSDFGKVTMQFELEVCQLQKPDVVGIRRQRLKGDAWVYKRLVEDILSSCKV

SEQ ID NO: 485 - protein, 129 aa, Homo sapiens
MVLEYCPGGELFDYIISQDRLSEEETRVVFRQIVSAVAYVHSQGYAHRDLKPENLLFDEYHKLKLIDFGLCAKPKGNKDYHLQTCCGSLAYAAPELIQGKSYLGSEMFGAWAYCYMFLCVDFYHLMMIM

SEQ ID NO: 486 - protein, 532 aa, Homo sapiens
MAPSFTARIQLFLLRALGFLIGLVGRAALVLGGPKFASKTPRPVTEPLLLLSGMQLAKLIRQRKVKCIDVVQAYINRIKDVNPMINGIVKYRFEEAMKEAHAVDQKLAEKQEDEATLENKWPFLGVPLTVKEAFQLQGMPNSSGLMNRRDAIAKTDATVVALLKGAGAIPLGITNCSELCMWYESSNKIYGRSNNPYDLQHIVGGSSGGEGCTLAAACSVIGVGSDIGGSIRMPAFFNGIFGHKPSPGVVPNKGQFPLAVGAQELFLCTGPMCRYAEDLAPMLKVMAGPGIKRLKLDTKVHLKDLKFYWMEHDGGSFLMSKVDQDLIMTQKKVVVHLETILGASVQHVKLKKMKYSFQLWIAMMSAKGHDGKEPVKFVDLLGDHGKHVSPLWELIKWCLGLSVYTIPSIGLALLEEKLRYSNEKYQKFKAVEESLRKELVDMLGDDGVFLYPSHPTVAPKHHVPLTRPFNFAYTGVFSALGLPVTQCPLGLNAKGLPLGIQVVAGPFNDHLTLAVAQYLEKTFGGWVCPGKF

SEQ ID NO: 487 - protein, 563 aa, Homo sapiens
MGLQACLLGLFALILSGKCSYSPEPDQRRTLPPGWVSLGRADPEEELSLTFALRQQNVERLSELVQAVSDPSSPQYGKYLTLENVADLVRPSPLTLHTVQKWLLAAGAQKCHSVITQDFLTCWLSIRQAELLLPGAEFHHYVGGPTETHVVRSPHPYQLPQALAPHVDFVGGLHRFPPTSSLRQRPEPQVTGTVGLHLGVTPSVIRKRYNLTSQDVGSGTSNNSQACAQFLEQYFHDSDLAQFMRLFGGNFAHQASVARVVGQQGRGRAGIEASLDVQYLMSAGANISTWVYSSPGRHEGQEPFLQWLMLLSNESALPHVHTVSYGDDEDSLSSAYIQRVNTELMKAAARGLTLLFASGDSGAGCWSVSGRHQFRPTFPASSPYVTTVGGTSFQEPFLITNEIVDYISGGGFSNVFPRPSYQEEAVTKFLSSSPHLPPSSYFNASGRAYPDVAALSDGYWVVSNRVPIPWVSGTSASTPVFGGILSLINEHRILSGRPPLGFLNPRLYQQHGAGLFDVTRGCHESCLDEEVEGQGFCSGPGWDPVTGWGTPNFPALLKTLLNP

SEQ ID NO: 488 - protein, 177 aa, Homo sapiens
MGLQACLLGLFALILSGKCSYSPEPDQRRTLPPGWVSLGRADPEEELSLTFALRQQNVERLSELVQAVSDPSSPQYGKYLTLENVADLVRPSPLTLHTVQKWLLAAGAQKCHSVITQDFLTCWLSIRQAELLLPGAEFHHYVGGPTETHVAGMRDRSPSCSGSCCSVMSQPCHMCIL

SEQ ID NO: 489 - protein, 39 aa, Homo sapiens
MGLQACLLGLFALILSGKCSYSPEPDQRRTKIPDPRECG

SEQ ID NO: 490 - protein, 30 aa, Homo sapiens
MGLQACLLGLFALILSGKCSYSPEPDQRRT

SEQ ID NO: 491 - protein, 387 aa, Homo sapiens
MREPLEAFKLADLDFRKSSLASGWRMASGAFTMDQFPESVTENFEYDDLAEACYIGDIVVFGTVFLSIFYSVIFAIGLVGNLLVVFALTNSKKPKSVTDIYLLNLALSDLLFVATLPFWTHYLINEKGLHNAMCKFTTAFFFIGFFGSIFFITVISIDRYLAIVLAANSMNNRTVQHGVTISLGVWAAAILVAAPQFMFTKQKENECLGDYPEVLQEIWPVLRNVETNFLGFLLPLLIMSYCYFRIIQTLFSCKNHKKAKAIKLILLVVIVFFLFWTPYNVMIFLETLKLYDFFPSCDMRKDLRLALSVTETVAFSHCCLNPLIYAFAGEKFRRYLYHLYGKCLAVLCGRSVHVDFSSSESQRSRHGSVLSSNFTYHTSDGDALLLL

SEQ ID NO: 492 - protein, 355 aa, Homo sapiens
MDQFPESVTENFEYDDLAEACYIGDIVVFGTVFLSIFYSVIFAIGLVGNLLVVFALTNSKKPKSVTDIYLLNLALSDLLFVATLPFWTHYLINEKGLHNAMCKFTTAFFFIGFFGSIFFITVISIDRYLAIVLAANSMNNRTVQHGVTISLGVWAAAILVAAPQFMFTKQKENECLGDYPEVLQEIWPVLRNVETNFLGFLLPLLIMSYCYFRIIQTLFSCKNHKKAKAIKLILLVVIVFFLFWTPYNVMIFLETLKLYDFFPSCDMRKDLRLALSVTETVAFSHCCLNPLIYAFAGEKFRRYLYHLYGKCLAVLCGRSVHVDFSSSESQRSRHGSVLSSNFTYHTSDGDALLLL

SEQ ID NO: 493 - protein, 106 aa, Homo sapiens
MDQFPESVTENFEYDDLAEACYIGDIVVFGTVFLSIFYSVIFAIGLVGNLLVVFALTNSKKPKSVTDIYLLNLALSDLLFVATLPFWTHYLINEKGLHNAMCKFTT

SEQ ID NO: 494 - protein, 166 aa, Homo sapiens
MDQFPESVTENFEYDDLAEACYIGDIVVFGTVFLSIFYSVIFAIGLVGNLLVVFALTNSKKPKSVTDIYLLNLALSDLLFVATLPFWTHYLINEKGLHNAMCKFTTAFFFIGFFGSIFFITVISIDRYLAIVLAANSMNNRTVQHGVTISLGVWAAAILVAAPQFM

SEQ ID NO: 495 - protein, 355 aa, Homo sapiens; identical to SEQ ID NO: 492

SEQ ID NO: 496 - protein, 355 aa, Homo sapiens; identical to SEQ ID NO: 492

SEQ ID NO: 497 - protein, 268 aa, Homo sapiens
MSGKHYKGPEVSCCIKYFIFGFNVIFWFLGITFLGIGLWAWNEKGVLSNISSITDLGGFDPVWLFLVVGGVMFILGFAGCIGALRENTFLLKFFSVFLGIIFFLELTAGVLAFVFKDWIKDQLYFFINNNIRAYRDDIDLQNLIDFTQEYWQCCGAFGADDWNLNIYFNCTDSNASRERCGVPFSCCTKDPAEDVINTQCGYDARQKPEVDQQIVIYTKGCVPQFEKWLQDNLTIVAGIFIGIALLQIFGICLAQNLVSDIEAVRASW

SEQ ID NO: 498 - protein, 197 aa, Homo sapiens
MFILGFAGCIGALRENTFLLKFFSVFLGIIFFLELTAGVLAFVFKDWIKDQLYFFINNNIRAYRDDIDLQNLIDFTQEYWQCCGAFGADDWNLNIYFNCTDSNASRERCGVPFSCCTKDPAEDVINTQCGYDARQKPEVDQQIVIYTKGCVPQFEKWLQDNLTIVAGIFIGIALLQIFGICLAQNLVSDIEAVRASW

SEQ ID NO: 499 - protein, 193 aa, Homo sapiens
MSGKHYKGPEVSCCIKYFIFGFNVIFWFLGITFLGIGLWAWNEKGVLSNISSITDLGGFDPVWLFLVVGGVMFILGFAGCIGALRENTFLLKFFSVFLGIIFFLELTAGVLAFVFKDWIKDQLYFFINNNIRAYRDDIDLQNLIDFTQEYIPMQVESDVAFHSPAALKIPQKMSSTLSVAMMPGKNQKLTSRL

SEQ ID NO: 500 - protein, 60 aa, Homo sapiens
MFILGFAGCIGALRENTFLLKFFSVFLGIIFFLELTAGVLAFVFKDWIKDQLYFFINNNI

SEQ ID NO: 501 - protein, 38 aa, Homo sapiens
MFILGFAGCIGALRENTFLLKFLKSPVLTEQAENYTFL

SEQ ID NO: 502 - protein, 110 aa, Homo sapiens
MFILGFAGCIGALRENTFLLKFFSVFLGIIFFLELTAGVLAFVFKDWIKDQLYFFINNNIRAYRDDIDLQNLIDFTQEYWQCCGAFGADDWNLNIYFNCTDSNASRERCG

SEQ ID NO: 503 - protein, 87 aa, Homo sapiens
  misc_feature (1)..(1): Xaa can be any naturally occurring amino acid
XVSCCIKYFIFGFNVIFWFLGITFLGIGLWAWNEKGVLSNISSITDLGGFDPVWLFLVVGGVMFILGFAGCIGALRENTFLLKFDKQ

SEQ ID NO: 504 - protein, 29 aa, Homo sapiens
SFASLKSGTCACTQTGRAGEAGGLRKAGS

SEQ ID NO: 505 - protein, 37 aa, Homo sapiens
MLLYPAGFSFASLKSGTCACTQTGRAGEAGGLRKAGS

SEQ ID NO: 506 - protein, 677 aa, Homo sapiens
MPGFLVRILPLLLVLLLLGPTRGLRNATQRMFEIDYSRDSFLKDGQPFRYISGSIHYSRVPRFYWKDRLLKMKMAGLNAIQTYVPWNFHEPWPGQYQFSEDHDVEYFLRLAHELGLLVILRPGPYICAEWEMGGLPAWLLEKESILLRSSDPDYLAAVDKWLGVLLPKMKPLLYQNGGPVITVQVENEYGSYFACDFDYLRFLQKRFRHHLGDDVVLFTTDGAHKTFLKCGALQGLYTTVDFGTGSNITDAFLSQRKCEPKGPLINSEFYTGWLDHWGQPHSTIKTEAVASSLYDILARGASVNLYMFIGGTNFAYWNGANSPYAAQPTSYDYDAPLSEAGDLTEKYFALRNIIQKFEKVPEGPIPPSTPKFAYGKVTLEKLKTVGAALDILCPSGPIKSLYPLTFIQVKQHYGFVLYRTTLPQDCSNPAPLSSPLNGVHDRAYVAVDGIPQGVLERNNVITLNITGKAGATLDLLVENMGRVNYGAYINDFKGLVSNLTLSSNILTDWTIFPLDTEDAVCSHLGGWGHRDSGHHDEAWAHNSSNYTLPAFYMGNFSIPSGIPDLPQDTFIQFPGWTKGQVWINGFNLGRYWPARGPQLTLFVPQHILMTSAPNTITVLELEWAPCSSDDPELCAVTFVDRPVIGSSVTYDHPSKPVEKRLMPPPPQKNKDSWLDHV

SEQ ID NO: 507 - protein, 546 aa, Homo sapiens
MPGFLVRILPLLLVLLLLGPTRGLRNATQRMFEIDYSRDSFLKDGQPFRYISGSIHYSRVPRFYWKDRLLKMKMAGLNAIQTLPGSCGQVVGSPSAQDEASPLSEWRASYNSAGSNITDAFLSQRKCEPKGPLINSEFYTGWLDHWGQPHSTIKTEAVASSLYDILARGASVNLYMFIGGTNFAYWNGANSPYAAQPTSYDYDAPLSEAGDLTEKYFALRNIIQKFEKVPEGPIPPSTPKFAYGKVTLEKLKTVGAALDILCPSGPIKSLYPLTFIQVKQHYGFVLYRTTLPQDCSNPAPLSSPLNGVHDRAYVAVDGIPQGVLERNNVITLNITGKAGATLDLLVENMGRVNYGAYINDFKGLVSNLTLSSNILTDWTIFPLDTEDAVCSHLGGWGHRDSGHHDEAWAHNSSNYTLPAFYMGNFSIPSGIPDLPQDTFIQFPGWTKGQVWINGFNLGRYWPARGPQLTLFVPQHILMTSAPNTITVLELEWAPCSSDDPELCAVTFVDRPVIGSSVTYDHPSKPVEKRLMPPPPQKNKDSWLDHV

SEQ ID NO: 508 - protein, 647 aa, Homo sapiens
MFEIDYSRDSFLKDGQPFRYISGSIHYSRVPRFYWKDRLLKMKMAGLNAIQTYVPWNFHEPWPGQYQFSEDHDVEYFLRLAHELGLLVILRPGPYICAEWEMGGLPAWLLEKESILLRSSDPDYLAAVDKWLGVLLPKMKPLLYQNGGPVITVQVENEYGSYFACDFDYLRFLQKRFRHHLGDDVVLFTTDGAHKTFLKCGALQGLYTTVDFGTGSNITDAFLSQRKCEPKGPLINSEFYTGWLDHWGQPHSTIKTEAVASSLYDILARGASVNLYMFIGGTNFAYWNGANSPYAAQPTSYDYDAPLSEAGDLTEKYFALRNIIQKFEKVPEGPIPPSTPKFAYGKVTLEKLKTVGAALDILCPSGPIKSLYPLTFIQVKQHYGFVLYRTTLPQDCSNPAPLSSPLNGVHDRAYVAVDGIPQGVLERNNVITLNITGKAGATLDLLVENMGRVNYGAYINDFKGLVSNLTLSSNILTDWTIFPLDTEDAVCSHLGGWGHRDSGHHDEAWAHNSSNYTLPAFYMGNFSIPSGIPDLPQDTFIQFPGWTKGQVWINGFNLGRYWPARGPQLTLFVPQHILMTSAPNTITVLELEWAPCSSDDPELCAVTFVDRPVIGSSVTYDHPSKPVEKRLMPPPPQKNKDSWLDHV

SEQ ID NO: 509 - protein, 185 aa, Homo sapiens
MPGFLVRILPLLLVLLLLGPTRGLRVENEYGSYFACDFDYLRFLQKRFRHHLGDDVVLFTTDGAHKTFLKCGALQGLYTTVDFGTGSNITDAFLSQRKCEPKGPLINSEFYTGWLDHWGQPHSTIKTEAVASSLYDILARGASVNLYMFIGGTNFAYWNGANSPYAAQPTSYDYDAPLSEAGDLT

SEQ ID NO: 510 - protein, 147 aa, Homo sapiens
MPGFLVRILPLLLVLLLLGPTRGLRSRFLPWAFHLPRQAPKSQLPLHKRGTKTAPNEHASSNRSGRRRRRQQWNATQRMFEIDYSRDSFLKDGQPFRYISGSIHYSRVPRFYWKDRLLKMKMAGLNAIQTYVPWNFHEPWPGQYQFS

SEQ ID NO: 511 - protein, 41 aa, Homo sapiens
MPGFLVRILPLLLVLLLLGPTRGLRITWQLWTSGWESFCPR

SEQ ID NO: 512 - protein, 114 aa, Homo sapiens
MGGLPAWLLEKESILLRSSDPDYLAAVDKWLGVLLPKMKPLLYQNGGPVITVQVENEYGSYFACDFDYLRFLQKRFRHHLGDDVVLFTTDGAHKTFLKCGALQGLYTTVDFGTG

SEQ ID NO: 513 - protein, 84 aa, Homo sapiens
MFEIDYSRDSFLKDGQPFRYISGSIHYSRVPRFYWKDRLLKMKMAGLNAIQTLPGSCGQVVGSPSAQDEASPLSEWRASYNSAG

SEQ ID NO: 514 - protein, 102 aa, Homo sapiens
MFEIDYSRDSFLKDGQPFRYISGSIHYSRVPRFYWKDRLLKMKMAGLNAIQTYVPWNFHEPWPGQYQFSEDHDVEYFLRLAHELGLLVILRPGPYICAEWEM

SEQ ID NO: 515 - protein, 150 aa, Homo sapiens
  misc_feature (1)..(1): Xaa can be any naturally occurring amino acid
XLGWSKAGSGSVCLALDQLRDVIESQEELIHQLRNVMVLQDENFVSKEEFQAVEKKLVEEKAAHAKTKVLLAKEEEKLQFALGEVEVLSKQLEKEKLAFEKALSSVKSKVLQESSKKDQLITKCNGITCLTSGSRSSRRATWPRCWTRSI

SEQ ID NO: 516 - protein, 63 aa, Homo sapiens
MAASGEPQRQWQEEVAAVVVVGSCMTDLVRRMCMRICYVHFCCQPTPQLQNCSSLCVITCQEN

SEQ ID NO: 517 - protein, 518 aa, Homo sapiens
MALERLCSVLKVLLITVLVVEGIAVAQKTQDGQNIGIKHIPATQCGIWVRTSNGGHFASPNYPDSYPPNKECIYILEAAPRQRIELTFDEHYYIEPSFECRFDHLEVRDGPFGFSPLIDRYCGVKSPPLIRSTGRFMWIKFSSDEELEGLGFRAKYSFIPDPDFTYLGDCQFELSGADGIVRSSQVEQEEKTKPGQAVDCIWTIKATPKAKIYLRFLDYQMEHSNECKRNFVAVYDGSSSIENLKAKFCSTVANDVMLKTGIGVIRMWADEGSRLSRFRMLFTSFVEPPCTSSTFFCHSNMCINNSLVCNGVQNCAYPWDENHCKEKKKAGVFEQITKTHGTIIGITSGIVLVLLIISILVQVKQPRKKVMACKTAFNKTGFQEVFDPPHYELFSLRDKEISADLADLSEELDNYQKMRRSSTASRCIHDHHCGSQASSVKQSRTNLSSMELPFRNDFAQPQPMKTFNSTFKKSSYTFKQGHECPEQALEDRVMEEIPCEIYVRGREDSAQASISIDF

SEQ ID NO: 518 - protein, 525 aa, Homo sapiens
MALERLCSVLKVLLITVLVVEGIAVAQKTQDGQNIGIKHIPATQCGIWVRTSNGGHFASPNYPDSYPPNKECIYILEAAPRQRIELTFDEHYYIEPSFECRFDHLEVRDGPFGFSPLIDRYCGVKSPPLIRSTGRFMWIKFSSDEELEGLGFRAKYSFIPDPDFTYLGGILNPIPDCQFELSGADGIVRSSQVEQEEKTKPGQAVDCIWTIKATPKAKIYLRFLDYQMEHSNECKRNFVAVYDGSSSIENLKAKFCSTVANDVMLKTGIGVIRMWADEGSRLSRFRMLFTSFVEPPCTSSTFFCHSNMCINNSLVCNGVQNCAYPWDENHCKEKKKAGVFEQITKTHGTIIGITSGIVLVLLIISILVQVKQPRKKVMACKTAFNKTGFQEVFDPPHYELFSLRDKEISADLADLSEELDNYQKMRRSSTASRCIHDHHCGSQASSVKQSRTNLSSMELPFRNDFAQPQPMKTFNSTFKKSSYTFKQGHECPEQALEDRVMEEIPCEIYVRGREDSAQASISIDF

SEQ ID NO: 519 - protein, 365 aa, Homo sapiens
  misc_feature (1)..(1): Xaa can be any naturally occurring amino acid
XLIDRYCGVKSPPLIRSTGRFMWIKFSSDEELEGLGFRAKYSFIPDPDFTYLGDCQFELSGADGIVRSSQVEQEEKTKPGQAVDCIWTIKATPKAKIYLRFLDYQMEHSNECKRNFVAVYDGSSSIENLKAKFCSTVANDVMLKTGIGVIRMWADEGSRLSRFRMLFTSFVEQKKKAGVFEQITKTHGTIIGITSGIVLVLLIISILVQVKQPRKKVMACKTAFNKTGFQEVFDPPHYELFSLRDKEISADLADLSEELDNYQKMRRSSTASRCIHDHHCGSQASSVKQSRTNLSSMELPFRNDFAQPQPMKTFNSTFKKSSYTFKQGHECPEQALEDRVMEEIPCEIYVRGREDSAQASISIDF

SEQ ID NO: 520 - protein, 194 aa, Homo sapiens
  misc_feature (1)..(1): Xaa can be any naturally occurring amino acid
XTYLGGILNPIPDCQFELSGADGIVRSSQVEQEEKTKPGQAVDCIWTIKATPKAKIYLRFLDYQMEHSNECKRNFVAVYDGSSSIENLKAKFCSTVANDVMLKTGIGVIRMWADEGSRLSRFRMLFTSFVEQKKKAGVFEQITKTHGTIIGITSGIVLVLLIISILVQVKQPRKKVMACKTAFNKTGFQEVFDP

SEQ ID NO: 521 - protein, 228 aa, Homo sapiens
  misc_feature (1)..(1): Xaa can be any naturally occurring amino acid
XSSSIENLKAKFCSTVANDVMLKTGIGVIRMWADEEKKKAGVFEQITKTHGTIIGITSGIVLVLLIISILVQVKQPRKKVMACKTAFNKTGFQEVFDPPHYELFSLRDKEISADLADLSEELDNYQKMRRSSTASRCIHDHHCGSQASSVKQSRTNLSSMELPFRNDFAQPQPMKTFNSTFKKSSYTFKQGHECPEQALEDRVMEEIPCEIYVRGREDSAQASISIDF

SEQ ID NO: 522 - protein, 347 aa, Homo sapiens
MSSWSRQRPKSPGGIQPHVSRTLFLLLLLAASAWGVTLSPKDCQVFRSDHGSSISCQPPAEIPGYLPADTVHLAVEFFNLTHLPANLLQGASKLQELHLSSNGLESLSPEFLRPVPQLRVLDLTRNALTGLPPGLFQASATLDTLVLKENQLEVLEVSWLHGLKALGHLDLSGNRLRKLPPGLLANFTLLRTLDLGENQLETLPPDLLRGPLQLERLHLEGNKLQVLGKDLLLPQPDLRYLFLNGNKLARVAAGAFQGLRQLDMLDLSNNSLASVPEGLWASLGQPNWDMRDGFDISGNPWICDQNLSDLYRWLQAQKDKMFSQNDTRCAGPEAVKGQTLLAVAKSQ

SEQ ID NO: 523 - protein, 330 aa, Homo sapiens
MRGPEPGPQPTMEGDVLDTLEALGYKGPLLEEQALTKAAEGGLSSPEFSELCIWLGSQIKSLCNLEESITSAGRDDLESFQLEISGFLKEMACPYSVLISGDIKDRLKKKEDCLKLLLFLSTELQASQILQNKKHKNSQLDKNSEVYQEVQAMFDTLGIPKSTTSDIPHMLNQVESKVKDILSKVQKNHVGKPLLKMDLNSEQAEQLERINDALSCEYECRRRMLMKRLDVTVQSFGWSDRAKVKTDDIARIYQPKRYALSPKTTITMAHLLAAREDLSKIIRTSSGTSREKTACAINKVGVSFSTVENELMISYLMFLQILVYFSFMSW

SEQ ID NO: 524 - protein, 101 aa, Homo sapiens
ISGDIKDRLKKKEDCLKLLLFLSTELQASQILQNKKHKNSQLDKNSEVYQEVQAMFDTLGIPKSTTSDIPHMLNQVESKVKDILSKIHMEEVVVVVVVVVE

SEQ ID NO: 525 - protein, 352 aa, Homo sapiens
MKPALLEVMRMNRICRMVLATCLGSFILVIFYFQSMLHPVMRRNPFGVDICCRKGSRSPLQELYNPIQLELSNTAVLHQMRRDQVTDTCRANSATSRKRRVLTPNDLKHLVVDEDHELIYCYVPKVACTNWKRLMMVLTGRGKYSDPMEIPANEAHVSANLKTLNQYSIPEINHRLKSYMKFLFVREPFERLVSAYRNKFTQKYNISFHKRYGTKIIKRQRKNATQEALRKGDDVKFEEFVAYLIDPHTQREEPFNEHWQTVYSLCHPCHIHYDLVGKYETLEEDSNYVLQLAGVGSYLKFPTYAKSTRTTDEMTTEFFQNISSEHQTQLYEVYKLDFLMFNYSVPSYLKLE

SEQ ID NO: 526 - protein, 72 aa, Homo sapiens
MKPALLEVMRMNRICRMVLATCLGSFILVIFYFQIMRRNPFGVDICCRKGSRSPLQELYNPIQVSFKHSVSM

SEQ ID NO: 527 - protein, 77 aa, Homo sapiens
MKPALLEVMRMNRICRMVLATCLGSFILVIFYFQSMLHPVMRRNPFGVDICCRKGSRSPLQELYNPIQVSFKHSVSM

SEQ ID NO: 528 - protein, 347 aa, Homo sapiens
MKPALLEVMRMNRICRMVLATCLGSFILVIFYFQIMRRNPFGVDICCRKGSRSPLQELYNPIQLELSNTAVLHQMRRDQVTDTCRANSATSRKRRVLTPNDLKHLVVDEDHELIYCYVPKVACTNWKRLMMVLTGRGKYSDPMEIPANEAHVSANLKTLNQYSIPEINHRLKSYMKFLFVREPFERLVSAYRNKFTQKYNISFHKRYGTKIIKRQRKNATQEALRKGDDVKFEEFVAYLIDPHTQREEPFNEHWQTVYSLCHPCHIHYDLVGKYETLEEDSNYVLQLAGVGSYLKFPTYAKSTRTTDEMTTEFFQNISSEHQTQLYEVYKLDFLMFNYSVPSYLKLE

SEQ ID NO: 529 - protein, 775 aa, Homo sapiens
MEPPYSLTAHYDEFQEVKYVSRCGAGGARGASLPPGFPLGAARSATGARSGLPRWNRREVCLLSGLVFAAGLCAILAAMLALKYLGPVAAGGGACPEGCPERKAFARAARFLAANLDASIDPCQDFYSFACGGWLRRHAIPDDKLTYGTIAAIGEQNEERLRRLLARPGGGPGGAAQRKVRAFFRSCLDMREIERLGPRPMLEVIEDCGGWDLGGAEERPGVAARWDLNRLLYKAQGVYSAAALFSLTVSLDDRNSSRYVIRIDQDGLTLPERTLYLAQDEDSEKILAAYRVFMERVLSLLGADAVEQKAQEILQVEQQLANITVSEHDDLRRDVSSMYNKVTLGQLQKITPHLRWKWLLDQIFQEDFSEEEEVVLLATDYMQQVSQLIRSTPHRVLHNYLVWRVVVVLSEHLSPPFREALHELAQEMEGSDKPQELARVCLGQANRHFGMALGALFVHEHFSAASKAKVQQLVEDIKYILGQRLEELDWMDAETRAAARAKLQYMMVMVGYPDFLLKPDAVDKEYEFEVHEKTYFKNILNSIRFSIQLSVKKIRQEVDKSTWLLPPQALNAYYLPNKNQMVFPAGILQPTLYDPDFPQSLNYGGIGTIIGHELTHGYDDWGGQYDRSGNLLHWWTEASYSRFLRKAECIVRLYDNFTVYNQRVNGKHTLGENIADMGGLKLAYHAYQKWVREHGPEHPLPRLKYTHDQLFFIAFAQNWCIKRRSQSIYLQVLTDKHAPEHYRVLGSVSQFEEFGRAFHCPKDSPMNPAHKCSVW

SEQ ID NO: 530 - protein, 773 aa, Homo sapiens
MEPPYSLTAHYDEFQEVKYVSRCGAGGARGASLPPGFPLGAARSATGARSGLPRWNRREVCLLSGLVFAAGLCAILAAMLALKYLGPVAAGGGACPEGCPERKAFARAARFLAANLDASIDPCQDFYSFACGGWLRRHAIPDDKLTYGTIAAIGEQNEERLRRLLARPGGGPGGAAQRKVRAFFRSCLDMREIERLGPRPMLEVIEDCGGWDLGGAEERPGVAARWDLNRLLYKAQGVYSAAALFSLTVSLDDRNSSRYVIRIDQDGLTLPERTLYLAQDEDSEKILAAYRVFMERVLSLLGADAVEQKAQEILQVEQQLANITVSEHDDLRRDVSSMYNKVTLGQLQKITPHLRWKWLLDQIFQEDFSEEEEVVLLATDYMQQVSQLIRSTPHRVLHNYLVWRVVVVLSEHLSPPFREALHELAQEMEGSDKPQELARVCLGQANRHFGMALGALFVHEHFSAASKAKVQQLVEDIKYILGQRLEELDWMDAETRAAARAKLQYMMVMVGYPDFLLKPDAVDKEYEFEVHEKTYFKNILNSIRFSIQLSVKKIRQEVDKWLLPPQALNAYYLPNKNQMVFPAGILQPTLYDPDFPQSLNYGGIGTIIGHELTHGYDDWGGQYDRSGNLLHWWTEASYSRFLRKAECIVRLYDNFTVYNQRVNGKHTLGENIADMGGLKLAYHAYQKWVREHGPEHPLPRLKYTHDQLFFIAFAQNWCIKRRSQSIYLQVLTDKHAPEHYRVLGSVSQFEEFGRAFHCPKDSPMNPAHKCSVW

SEQ ID NO: 531 - protein, 233 aa, Homo sapiens
MSQSNRELVVDFLSYKLSQKGYSWSQFSDVEENRTEAPEGTESEMETPSAINGNPSWHLADSPAVNGATGHSSSLDAREVIPMAAVKQALREAGDEFELRYRRAFSDLTSQLHITPGTAYQSFEQVVNELFRDGVNWGRIVAFFSFGGALCVESVDKEMQVLVSRIAAWMATYLNDHLEPWIQENGGWDTFVELYGNNAAAESRKGQERFNRWFLTGMTVAGVVLLGSLFSRK

SEQ ID NO: 532 - protein, 170 aa, Homo sapiens
MSQSNRELVVDFLSYKLSQKGYSWSQFSDVEENRTEAPEGTESEMETPSAINGNPSWHLADSPAVNGATGHSSSLDAREVIPMAAVKQALREAGDEFELRYRRAFSDLTSQLHITPGTAYQSFEQDTFVELYGNNAAAESRKGQERFNRWFLTGMTVAGVVLLGSLFSRK

SEQ ID NO: 533 - protein, 233 aa, Homo sapiens; identical to SEQ ID NO: 531

SEQ ID NO: 534 - protein, 813 aa, Homo sapiens
MSLLGDPLQALPPSAAPTGPLLAPPAGATLNRLREPLLRRLSELLDQAPEGRGWRRLAELAGSRGRLRLSCLDLEQCSLKVLEPEGSPSLCLLKLMGEKGCTVTELSDFLQAMEHTEVLQLLSPPGIKITVNPESKAVLAGQFVKLCCRATGHPFVQYQWFKMNKEIPNGNTSELIFNAVHVKDAGFYVCRVNNNFTFEFSQWSQLDVCDIPESFQRSVDGVSESKLQICVEPTSQKLMPGSTLVLQCVAVGSPIPHYQWFKNELPLTHETKKLYMVPYVDLEHQGTYWCHVYNDRDSQDSKKVEIIIDELNNLGHPDNKEQTTDQPLAKDKVALLIGNMNYREHPKLKAPLVDVYELTNLLRQLDFKVVSLLDLTEYEMRNAVDEFLLLLDKGVYGLLYYAGHGYENFGNSFMVPVDAPNPYRSENCLCVQNILKLMQEKETGLNVFLLDMCRKRNDYDDTIPILDALKVTANIVFGYATCQGAEAFEIQHSGLANGIFMKFLKDRLLEDKKITVLLDEVAEDMGKCHLTKGKQALEIRSSLSEKRALTDPIQGTEYSAESLVRNLQWAKAHELPESMCLKFDCGVQIQLGFAAEFSNVMIIYTSIVYKPPEIIMCDAYVTDFPLDLDIDPKDANKGTPEETGSYLVSKDLPKHCLYTRLSSLQKLKEHLVFTVCLSYQYSGLEDTVEDKQEVNVGKPLIAKLDMHRGLGRKTCFQTCLMSNGPYQSSAATSGGAGHYHSLQDPFHGVYHSHPGNPSNVTPADSCHCSRTPDAFISSFAHHASCHFSRSNVPVETTDEIPFSFSDRLRISEK

SEQ ID NO: 535 - protein, 824 aa, Homo sapiens
MSLLGDPLQALPPSAAPTGPLLAPPAGATLNRLREPLLRRLSELLDQAPEGRGWRRLAELAGSRGRLRLSCLDLEQCSLKVLEPEGSPSLCLLKLMGEKGCTVTELSDFLQAMEHTEVLQLLSPPGIKITVNPESKAVLAGQFVKLCCRATGHPFVQYQWFKMNKEIPNGNTSELIFNAVHVKDAGFYVCRVNNNFTFEFSQWSQLDVCDIPESFQRSVDGVSESKLQICVEPTSQKLMPGSTLVLQCVAVGSPIPHYQWFKNELPLTHETKKLYMVPYVDLEHQGTYWCHVYNDRDSQDSKKVEIIIGRTDEAVECTEDELNNLGHPDNKEQTTDQPLAKDKVALLIGNMNYREHPKLKAPLVDVYELTNLLRQLDFKVVSLLDLTEYEMRNAVDEFLLLLDKGVYGLLYYAGHGYENFGNSFMVPVDAPNPYRSENCLCVQNILKLMQEKETGLNVFLLDMCRKRNDYDDTIPILDALKVTANIVFGYATCQGAEAFEIQHSGLANGIFMKFLKDRLLEDKKITVLLDEVAEDMGKCHLTKGKQALEIRSSLSEKRALTDPIQGTEYSAESLVRNLQWAKAHELPESMCLKFDCGVQIQLGFAAEFSNVMIIYTSIVYKPPEIIMCDAYVTDFPLDLDIDPKDANKGTPEETGSYLVSKDLPKHCLYTRLSSLQKLKEHLVFTVCLSYQYSGLEDTVEDKQEVNVGKPLIAKLDMHRGLGRKTCFQTCLMSNGPYQSSAATSGGAGHYHSLQDPFHGVYHSHPGNPSNVTPADSCHCSRTPDAFISSFAHHASCHFSRSNVPVETTDEIPFSFSDRLRISEK

SEQ ID NO: 536 - protein, 119 aa, Homo sapiens
MGEKGCTVTELSDFLQAMEHTEVLQLLSPPGIKITVNPESKAVLAGQFVKLCCRATGHPFVQYQWFKMNKEIPNGNTSELIFNAVHVKDAGFYVCRVNNNFTFEFSQWSQLDVCDIPES

SEQ ID NO: 537 - protein, 506 aa, Homo sapiens
MAGEVSAATGRFSLERLGLPGLALAAALLLLALCLLVRRTRRPGEPPLIKGWLPYLGVVLNLRKDPLRFMKTLQKQHGDTFTVLLGGKYITFILDPFQYQLVIKNHKQLSFRVFSNKLLEKAFSISQLQKNHDMNDELHLCYQFLQGKSLDILLESMMQNLKQVFEPQLLKTTSWDTAELYPFCSSIIFEITFTTIYGKVIVCDNNKFISELRDDFLKFDDKFAYLVSNIPIELLGNVKSIREKIIKCFSSEKLAKMQGWSEVFQSRQDVLEKYYVHEDLEIGAHHLGFLWASVANTIPTMFWAMYYLLRHPEAMAAVRDEIDRLLQSTGQKKGSGFPIHLTREQLDSLICLESSIFEALRLSSYSTTIRFVEEDLTLSSETGDYCVRKGDLVAIFPPVLHGDPEIFEAPEEFRYDRFIEDGKKKTTFFKRGKKLKCYLMPFGTGTSKCPGRFFALMEIKQLLVILLTYFDLEIIDDKPIGLNYSRLLFGIQYPDSDVLFRYKVKS

SEQ ID NO: 538 - protein, 543 aa, Homo sapiens
MLLRSKPALPPPLMLLLLGPLGPLSPGALPRPAQAQDVVDLDFFTQEPLHLVSPSFLSVTIDANLATDPRFLILLGSPKLRTLARGLSPAYLRFGGTKTDFLIFDPKKESTFEERSYWQSQVNQDICKYGSIPPDVEEKLRLEWPYQEQLLLREHYQKKFKNSTYSRSSVDVLYTFANCSGLDLIFGLNALLRTADLQWNSSNAQLLLDYCSSKGYNISWELGNEPNSFLKKADIFINGSQLGEDFIQLHKLLRKSTFKNAKLYGPDVGQPRRKTAKMLKSFLKAGGEVIDSVTWHHYYLNGRTATKEDFLNPDVLDIFISSVQKVFQVVESTRPGKKVWLGETSSAYGGGAPLLSDTFAAGFMWLDKLGLSARMGIEVVMRQVFFGAGNYHLVDENFDPLPDYWLSLLFKKLVGTKVLMASVQGSKRRKLRVYLHCTNTDNPRYKEGDLTLYAINLHNVTKYLRLPYPFSNKQVDKYLLRPLGPHGLLSKSVQLNGLTLKMVDDQTLPPLMEKPLRPGSSLGLPAFSYSFFVIRNAKVAACI

SEQ ID NO: 539 - protein, 543 aa, Homo sapiens; identical to SEQ ID NO: 538

SEQ ID NO: 540 - protein, 226 aa, Homo sapiens
MLLRSKPALPPPLMLLLLGPLGPLSPGALPRPAQAQDVVDLDFFTQEPLHLVSPSFLSVTIDANLATDPRFLILLGSPKLRTLARGLSPAYLRFGGTKTDFLIFDPKKESTFEERSYWQSQVNQDICKYGSIPPDVEEKLRLEWPYQEQLLLREHYQKKFKNSTYSRSSVDVLYTFANCSGLDLIFGLNALLRTADLQWNSSNAQLLLDYCSSKGYNISWELGNAS

SEQ ID NO: 541 - protein, 168 aa, Homo sapiens
MLLRSKPALPPPLMLLLLGPLGPLSPGALPRPAQAQDVVDLDFFTQEPLHLVSPSFLSVTIDANLATDPRFLILLGSPKLRTLARGLSPAYLRFGGTKTDFLIFDPKKESTFEERSYWQSQVNQDICKYGSIPPDVEEKLRLEWPYQEQLLLREHYQKKFKNSTYSTS

SEQ ID NO: 542 - protein, 380 aa, Homo sapiens
MLLRSKPALPPPLMLLLLGPLGPLSPGALPRPAQAQDVVDLDFFTQEPLHLVSPSFLSVTIDANLATDPRFLILLGSPKLRTLARGLSPAYLRFGGTKTDFLIFDPKKESTFEERSYWQSQVNQDICKYGSIPPDVEEKLRLEWPYQEQLLLREHYQKKFKNSTYSRSSVDVLYTFANCSGLDLIFGLNALLRTADLQWNSSNAQLLLDYCSSKGYNISWELGNEPNSFLKKADIFINGSQLGEDFIQLHKLLRKSTFKNAKLYGPDVGQPRRKTAKMLKSFLKAGGEVIDSVTWHHYYLNGRTATKEDFLNPDVLDIFISSVQKVFQVVESTRPGKKVWLGETSSAYGGGAPLLSDTFAAGFMIIGYLFCSRNWWAPRC

SEQ ID NO: 543 - protein, 469 aa, Homo sapiens
MLLRSKPALPPPLMLLLLGPLGPLSPGALPRPAQAQDVVDLDFFTQEPLHLVSPSFLSVTIDANLATDPRFLILLGSPKLRTLARGLSPAYLRFGGTKTDFLIFDPKKESTFEERSYWQSQVNQDICKYGSIPPDVEEKLRLEWPYQEQLLLREHYQKKFKNSTYSRSSVDVLYTFANCSGLDLIFGLNALLRTADLQWNSSNAQLLLDYCSSKGYNISWELGNEPNSFLKKADIFINGSQLGEDFIQLHKLLRKSTFKNAKLYGPDVGQPRRKTAKMLKSFLKAGGEVIDSVTWHHYYLNGRTATKEDFLNPDVLDIFISSVQKVFQDYWLSLLFKKLVGTKVLMASVQGSKRRKLRVYLHCTNTDNPRYKEGDLTLYAINLHNVTKYLRLPYPFSNKQVDKYLLRPLGPHGLLSKSVQLNGLTLKMVDDQTLPPLMEKPLRPGSSLGLPAFSYSFFVIRNAKVAACI

SEQ ID NO: 544 - protein, 485 aa, Homo sapiens
MLLRSKPALPPPLMLLLLGPLGPLSPGALPRPAQAQDVVDLDFFTQEPLHLVSPSFLSVTIDANLATDPRFLILLGSPKLRTLARGLSPAYLRFGGTKTDFLIFDPKKESTFEERSYWQSQVNQDICKYGSIPPDVEEKLRLEWPYQEQLLLREHYQKKFKNSTYSKPNSFLKKADIFINGSQLGEDFIQLHKLLRKSTFKNAKLYGPDVGQPRRKTAKMLKSFLKAGGEVIDSVTWHHYYLNGRTATKEDFLNPDVLDIFISSVQKVFQVVESTRPGKKVWLGETSSAYGGGAPLLSDTFAAGFMWLDKLGLSARMGIEVVMRQVFFGAGNYHLVDENFDPLPDYWLSLLFKKLVGTKVLMASVQGSKRRKLRVYLHCTNTDNPRYKEGDLTLYAINLHNVTKYLRLPYPFSNKQVDKYLLRPLGPHGLLSKSVQLNGLTLKMVDDQTLPPLMEKPLRPGSSLGLPAFSYSFFVIRNAKVAACI

SEQ ID NO: 545 - protein, 524 aa, Homo sapiens
MDTESTYSGYSYYSSHSKKSHRQGERTRERHKSPRNKDGRGSEKSVTIQPPTGEPLLGNDSTRTEEVQDDNWGETTTAITGTSEHSISQEDIARISKDMEDSVGLDCKRYLGLTVASFLGLLVFLTPIAFILLPPILWRDELEPCGTICEGLFISMAFKLLILLIGTWALFFRKRRADMPRVFVFRALLLVLIFLFVVSYWLFYGVRILDSRDRNYQGIVQYAVSLVDALLFIHYLAIVLLELRQLQPMFTLQVVRSTDGESRFYSLGHLSIQRAALVVLENYYKDFTIYNPNLLTASKFRAAKHMAGLKVYNVDGPSNNATGQSRAMIAAAARRRDSSHNELYYEEAEHERRVKKRKARLVVAVEEAFIHIQRLQAEEQQKAPGEVMDPREAAQAIFPSMARALQKYLRITRQQNYHSMESILQHLAFCITNGMTPKAFLERYLSAGPTLQYDKDRWLSTQWRLVSDEAVTNGLRDGIVFVLKCLDFSLVVNVKKIPFIILSEEFIDPKSHKFVLRLQSETSV

SEQ ID NO: 546 - protein, 524 aa, Homo sapiens; identical to SEQ ID NO: 545

SEQ ID NO: 547 - protein, 524 aa, Homo sapiens; identical to SEQ ID NO: 545

SEQ ID NO: 548 - protein, 522 aa, Homo sapiens
MDTESTYSGYSYYSSHSKKSHRQGERTRERHKSPRNKDGRGSEKSVTIQPPTGEPLLGNDSTRTEEDDNWGETTTAITGTSEHSISQEDIARISKDMEDSVGLDCKRYLGLTVASFLGLLVFLTPIAFILLPPILWRDELEPCGTICEGLFISMAFKLLILLIGTWALFFRKRRADMPRVFVFRALLLVLIFLFVVSYWLFYGVRILDSRDRNYQGIVQYAVSLVDALLFIHYLAIVLLELRQLQPMFTLQVVRSTDGESRFYSLGHLSIQRAALVVLENYYKDFTIYNPNLLTASKFRAAKHMAGLKVYNVDGPSNNATGQSRAMIAAAARRRDSSHNELYYEEAEHERRVKKRKARLVVAVEEAFIHIQRLQAEEQQKAPGEVMDPREAAQAIFPSMARALQKYLRITRQQNYHSMESILQHLAFCITNGMTPKAFLERYLSAGPTLQYDKDRWLSTQWRLVSDEAVTNGLRDGIVFVLKCLDFSLVVNVKKIPFIILSEEFIDPKSHKFVLRLQSETSV

SEQ ID NO: 549 - protein, 240 aa, Homo sapiens
MAGPPRLLLLPLLLALARGLPGALAAQEVQQSPHCTTVPVGASVNITCSTSGGLRGIYLRQLGPQPQDIIYYEDGVVPTTDRRFRGRIDFSGSQDNLTITMHRLQLSDTGTYTCQAITEVNVYGSGTLVLVTEEQSQGWHRCSDAPPRASALPAPPTGSALPDPQTASALPDPPAASALPAALAVISFLLGLGLGVACVLARTQIKKLCSWRDKNSAACVVYEDMSHSRCNTLSSPNQYQ

SEQ ID NO: 550 - protein, 121 aa, Homo sapiens
MHRLQLSDTGTYTCQAITEVNVYGSGTLVLVTEEQSQGWHRCSDAPPRASALPAPPTGSALPDPQTASALPDPPAASALPAALAVISFLLGLGLGVACVLARTQVSVSPSCHLHPKDCSLS

SEQ ID NO: 551 - protein, 35 aa, Homo sapiens
MAGPPRLLLLPLLLALARGLPGALAAQAGACVGST

SEQ ID NO: 552 - protein, 160 aa, Homo sapiens
MAGPPRLLLLPLLLALARGLPGALAAQGRTFSVLLARLMVTAQVLPRGAAVSPLHDCPRGSLRQHHLLHQRGPAWDLPEAARATAPRHHLLRGRGGAHYGQTVPGPHRLLRVPGQPDYHHAPPAAVGHWHLHLPGHHGGQCLRLRHPGPGDRGTVPRMAQ

SEQ ID NO: 553 - protein, 140 aa, Homo sapiens
MHRLQLSDTGTYTCQAITEVNVYGSGTLVLVTEEQSQGWHRCSDAPPRASALPAPPTGSALPDPQTASALPDPPAASALPAALAVISFLLGLGLGVACVLARTQIKKLCSWRDKNSAACVVYEDMSHSRCNTLSSPNQYQ

SEQ ID NO: 554 - protein, 221 aa, Homo sapiens
MAGPPRLLLLPLLLALARGLPGALAAQEVQQSPHCTTVPVGASVNITCSTSGGLRGIYLRQLGPQPQDIIYYEDGVVPTTDRRFRGRIDFSGSQDNLTITMHRLQLSDTGTYTCQAITEVNVYGSGTLVLVTEEQSQGWHRCSDAPPRASALPAPPTGSALPDPQTASALPDPPAASALPAALAVISFLLGLGLGVACVLARTQVSVSPSCHLHPKDCSLS

SEQ ID NO: 555 - protein, 40 aa, Homo sapiens
  misc_feature (1)..(1): Xaa can be any naturally occurring amino acid
XNYEMPRGDTSSLRAPAEDLRWVEKTLSLLYSPQVAGSSR

SEQ ID NO: 556 - protein, 107 aa, Homo sapiens
MQCQGYVALLGSDDQSWGWNLVDNNLLHNGEVNGSFPQCNNAPKYQIGERIRVILDMEDKTLAFERGYEFLGVAFRGLPKVCLYPAVSAVYGNTEVTLVYLGKPLDG

SEQ ID NO: 557 - protein, 530 aa, Homo sapiens
MSRSPQRALPPGALPRLLQAAPAAAPRALLPQWPRRPGRRWPASPLGMKVFRRKALVLCAGYALLLVLTMLNLLDYKWHKEPLQQCNPDGPLGAAAGAAGGSWGRPGPPPAGPPRAHARLDLRTPYRPPAAAVGAAPAAAAGMAGVAAPPGNGTRGTGGVGDKRQLVYVFTTWRSGSSFFGELFNQNPEVFFLYEPVWHVWQKLYPGDAVSLQGAARDMLSALYRCDLSVFQLYSPAGSGGRNLTTLGIFGAATNKVVCSSPLCPAYRKEVVGLVDDRVCKKCPPQRLARFEEECRKYRTLVIKGVRVFDVAVLAPLLRDPALDLKVIHLVRDPRAVASSRIRSRHGLIRESLQVVRSRDPRAHRMPFLEAAGHKLGAKKEGVGGPADYHALGAMEVICNSMAKTLQTALQPPDWLQGHYLVVRYEDLVGDPVKTLRRVYDFVGLLVSPEMEQFALNMTSGSGSSSKPFVVSARNATQAANAWRTALTFQQIKQVEEFCYQPMAVLGYERVNSPEEVKDLSKTLLRKPRL

SEQ ID NO: 558 - protein, 84 aa, Homo sapiens
MKQTQVGSLFSLGIRNPEPGPVSGTAVPRQLAWKSGKYVMVMGVVQACSPEPCLQAVKMTDLSDNPIHESMWELEVEDLHRNIP

SEQ ID NO: 559 - protein, 313 aa, Homo sapiens
MALLVDRVRGHWRIAAGLLFNLLVSICIVFLNKWIYVYHGFPNMSLTLVHFVVTWLGLYICQKLDIFAPKSLPPSRLLLLALSFCGFVVFTNLSLQNNTIGTYQLAKAMTTPVIIAIQTFCYQKTFSTRIQLTLIPITLGVILNSYYDVKFNFLGMVFAALGVLVTSLYQVWVGAKQHELQVNSMQLLYYQAPMSSAMLLVAVPFFEPVFGEGGIFGPWSVSALLMVLLSGVIAFMVNLSIYWIIGNTSPVTYNMFGHFKFCITLFGGYVLFKDPLSINQALGILCTLFGILAYTHFKLSEQEGSRSKLAQRP

SEQ ID NO: 560 - protein, 125 aa, Homo sapiens
QAPMSSAMLLVAVPFFEPVFGEGGIFGPWSVSALSTRLECSGTIMAHCSLSLLGSSNPPASTSPVAGTTGAHQHTWLIFIFFVETEFCHVAQADLKLLSSSHLSASASRSAGITGLSHHTWPVIS

SEQ ID NO: 561 - protein, 34 aa, Homo sapiens
MTVMSLSRDLKDDFHSDTVLSILNEQRIRGILCD

SEQ ID NO: 562 - protein, 193 aa, Homo sapiens
MAEAEESPGDPGTASPRPLMRDLKAVGKKFMHVLYPRKSNTLLRDWDLWGPLILCVTLALMLQRDSADSEKDGGPQFAEVFVIVWFGAVTITLNSKLLGGNISFFQSLCVLGYCILPLTVAMLICRLVLLADPGPVNFMVRLFVVIVMFAWSIVASTAFLADSQPPNRRALAVYPVFLFYFVISWMILTFTPQ

SEQ ID NO: 563 - protein, 188 aa, Homo sapiens
MAEAEESPGDPGTASPRPLMRDLKAVGKKFMHVLYPRKSNTLLRDWDLWGPLILCVTLALMLQRDSADSEKDGGPQFAEVFVIVWFGAVTITLNSKLLGGNISFFQSLCVLGYCILPLTVAMLICRLVLLADPGPVNFMVRLFVVIVMFAWSIVASTAFLADSQPPNRRALAVYPVFLFYFVISWMIL

SEQ ID NO: 564 - protein, 236 aa, Homo sapiens
MAEAEESPGDPGTASPRPLFAGLSDISISQDIPVEGEITIPMRSRIREFDSSTLNESVRNTIMRDLKAVGKKFMHVLYPRKSNTLLRDWDLWGPLILCVTLALMLQRDSADSEKDGGPQFAEVFVIVWFGAVTITLNSKLLGGNISFFQSLCVLGYCILPLTVAMLICRLVLLADPGPVNFMVRLFVVIVMFAWSIVASTAFLADSQPPNRRALAVYPVFLFYFVISWMILTFTPQ

SEQ ID NO: 565 - protein, 520 aa, Homo sapiens
MEVLESGEQGVLQWDRKLSELSEPGDGEALMYHTHFSELLDEFSQNVLGQLLNDPFLSEKSVSMEVEPSPTSPAPLIQAEHSYSLCEEPRAQSPFTHITTSDSFNDDEVESEKWYLSTDFPSTSIKTEPVTDEPPPGLVPSVTLTITAISTPLEKEEPPLEMNTGVDSSCQTIIPKIKLEPHEVDQFLNFSPKEAPVDHLHLPPTPPSSHGSDSEGSLSPNPRLHPFSLPQTHSPSRAAPRAPSALSSSPLLTAPHKLQGSGPLVLTEEEKRTLIAEGYPIPTKLPLSKSEEKALKKIRRKIKNKISAQESRRKKKEYMDSLEKKVESCSTENLELRKKVEVLENTNRTLLQQLQKLQTLVMGKVSRTCKLAGTQTGTCLMVVVLCFAVAFGSFFQGYGPYPSATKMALPSQHSLQEPYTASVVRSRNLLIYEEHSPPEESSSPGSAGELGGWDRGSSLLRVSGLESRPDVDLPHFIISNETSLEKSVLLELQQHLVSAKLEGNETLKVVELDRRVNTTF

SEQ ID NO: 566 - protein, 240 aa, Homo sapiens [sequence omitted]

SEQ ID NO: 567 - protein, 460 aa, Homo sapiens
MEVLESGEQGVLQWDRKLSELSEPGDGEALMYHTHFSELLDEFSQNVLGQLLNDPFLSEKSVSMEVEPSPTSPAPLIQAEHSYSLCEEPRAQSPFTHITTSDSFNDDEVESEKWYLSTDFPSTSIKTEPVTDEPPPGLVPSVTLTITAISTPLEKEEPPLEMNTGVDSSCQTIIPKIKLEPHEVDQFLNFSPKEAPVDHLHLPPTPPSSHGSDSEGSLSPNPRLHPFSLPQTHSPSRAAPRAPSALSSSPLLTAPHKLQGSGPLVLTEEEKRTLIAEGYPIPTKLPLSKSEEKALKKIRRKIKNKISAQESRRKKKEYMDSLEKKVESCSTENLELRKKVEVLENTNRTLLQQLQKLQTLVMGKVSRTCKLAGTQTGTCLMVVVLCFAVAFGSFFQGYGPYPSATKMALPSQHSLQEPYTASVGKTACGKLGRVLFYFPRAGFLSLPKGIFCESPMFKKW

SEQ ID NO: 568 - protein, 449 aa, Homo sapiens
MDRVYEIPEEPNVDPVSSLEEDVIRGANPRFTFPFSILFSTFLYCGEAASALYMVRIYRKNSETYWMTYTFSFFMFSSIMVQLTLIFVHRDLAKDKPLSLFMHLILLGPVIRCLEAMIKYLTLWKKEEQEEPYVSLTRKKMLIDGEEVLIEWEVGHSIRTLAMHRNAYKRMSQIQAFLGSVPQLTYQLYVSLISAEVPLGRVVLMVFSLVSVTYGATLCNMLAIQIKYDDYKIRLGPLEVLCITIWRTLEITSRLLILVLFSATLKLKAVPFLVLNFLIILFEPWIKFWRSGAQMPNNIEKNFSRVGTLVVLISVTILYAGINFSCWSALQLRLADRDLVDKGQNWGHMGLHYSVRLVENVIMVLVFKFFGVKVLLNYCHSLIALQLIIAYLISIGFMLLFFQYLHPLRSLFTHNVVDYLHCVCCHQHPRTRVENSEPPFETEARQSVV

SEQ ID NO: 569 - protein, 139 aa, Homo sapiens
MDRVYEIPEEPNVDPVSSLEEDVIRGANPRFTFPFSILFSTFLYCGEAASALYMVRIYRKNSETYWMTYTFSFFMFSSIMVQLTLIFVHRDLAKDKPLSLFMHLILLGPVISCANGIFPGICHLWGHPLQYVGYPDQVR

SEQ ID NO: 570 - protein, 471 aa, Homo sapiens
MASVVLPSGSQCAAAAAAAAPPGLRLRLLLLLFSAAALIPTGDGQNLFTKDVTVIEGEVATISCQVNKSDDSVIQLLNPNRQTIYFRDFRPLKDSRFQLLNFSSSELKVSLTNVSISDEGRYFCQLYTDPPQESYTTITVLVPPRNLMIDIQKDTAVEGEEIEVNCTAMASKPATTIRWFKGNTELKGKSEVEEWSDMYTVTSQLMLKVHKEDDGVPVICQVEHPAVTGNLQTQRYLEVQYKPQVHIQMTYPLQGLTREGDALELTCEAIGKPQPVMVTWVRVDDEMPQHAVLSGPNLFINNLNKTDNGTYRCEASNIVGKAHSDYMLYVYDPPTTIPPPTTTTTTTTTTTTTILTIITDTTATTEPAVHGLTQLPNSAEELDSEDLSDSRAGEEGSIRAVDHAVIGGVVAVVVFAMLCLLIILGRYFARHKGTYFTHEAKGADDAADADTAIINAEGGQNNSEEKKEYFI

SEQ ID NO: 571 - protein, 442 aa, Homo sapiens
MASVVLPSGSQCAAAAAAAAPPGLRLRLLLLLFSAAALIPTGDGQNLFTKDVTVIEGEVATISCQVNKSDDSVIQLLNPNRQTIYFRDFRPLKDSRFQLLNFSSSELKVSLTNVSISDEGRYFCQLYTDPPQESYTTITVLVPPRNLMIDIQKDTAVEGEEIEVNCTAMASKPATTIRWFKGNTELKGKSEVEEWSDMYTVTSQLMLKVHKEDDGVPVICQVEHPAVTGNLQTQRYLEVQYKPQVHIQMTYPLQGLTREGDALELTCEAIGKPQPVMVTWVRVDDEMPQHAVLSGPNLFINNLNKTDNGTYRCEASNIVGKAHSDYMLYVYDPPTTIPPPTTTTTTTTTTTTTILTIITDSRAGEEGSIRAVDHAVIGGVVAVVVFAMLCLLIILGRYFARHKGTYFTHEAKGADDAADADTAIINAEGGQNNSEEKKEYFI

SEQ ID NO: 572 - protein, 443 aa, Homo sapiens
MASVVLPSGSQCAAAAAAAAPPGLRLRLLLLLFSAAALIPTGDGQNLFTKDVTVIEGEVATISCQVNKSDDSVIQLLNPNRQTIYFRDFRPLKDSRFQLLNFSSSELKVSLTNVSISDEGRYFCQLYTDPPQESYTTITVLVPPRNLMIDIQKDTAVEGEEIEVNCTAMASKPATTIRWFKGNTELKGKSEVEEWSDMYTVTSQLMLKVHKEDDGVPVICQVEHPAVTGNLQTQRYLEVQYKPQVHIQMTYPLQGLTREGDALELTCEAIGKPQPVMVTWVRVDDEMPQHAVLSGPNLFINNLNKTDNGTYRCEASNIVGKAHSDYMLYVYDTTATTEPAVHGLTQLPNSAEELDSEDLSDSRAGEEGSIRAVDHAVIGGVVAVVVFAMLCLLIILGRYFARHKGTYFTHEAKGADDAADADTAIINAEGGQNNSEEKKEYFI

SEQ ID NO: 573 - protein, 453 aa, Homo sapiens
MASVVLPSGSQCAAAAAAAAPPGLRLRLLLLLFSAAALIPTGDGQNLFTKDVTVIEGEVATISCQVNKSDDSVIQLLNPNRQTIYFRDFRPLKDSRFQLLNFSSSELKVSLTNVSISDEGRYFCQLYTDPPQESYTTITVLVPPRNLMIDIQKDTAVEGEEIEVNCTAMASKPATTIRWFKGNTELKGKSEVEEWSDMYTVTSQLMLKVHKEDDGVPVICQVEHPAVTGNLQTQRYLEVQYKPQVHIQMTYPLQGLTREGDALELTCEAIGKPQPVMVTWVRVDDEMPQHAVLSGPNLFINNLNKTDNGTYRCEASNIVGKAHSDYMLYVYDPPTTIPPPTTTTTTTTTTTTTILTIITDTTATTEPAVHDSRAGEEGSIRAVDHAVIGGVVAVVVFAMLCLLIILGRYFARHKGTYFTHEAKGADDAADADTAIINAEGGQNNSEEKKEYFI

SEQ ID NO: 574 - protein, 67 aa, Homo sapiens
MASVVLPSGSQCAAAAAAAAPPGLRLRLLLLLFSAAALIPTGLTSSPRLECGGTISAHCSLGLPVLR

SEQ ID NO: 575 - protein, 414 aa, Homo sapiens
MASVVLPSGSQCAAAAAAAAPPGLRLRLLLLLFSAAALIPTGDGQNLFTKDVTVIEGEVATISCQVNKSDDSVIQLLNPNRQTIYFRDFRPLKDSRFQLLNFSSSELKVSLTNVSISDEGRYFCQLYTDPPQESYTTITVLVPPRNLMIDIQKDTAVEGEEIEVNCTAMASKPATTIRWFKGNTELKGKSEVEEWSDMYTVTSQLMLKVHKEDDGVPVICQVEHPAVTGNLQTQRYLEVQYKPQVHIQMTYPLQGLTREGDALELTCEAIGKPQPVMVTWVRVDDEMPQHAVLSGPNLFINNLNKTDNGTYRCEASNIVGKAHSDYMLYVYDSRAGEEGSIRAVDHAVIGGVVAVVVFAMLCLLIILGRYFARHKGTYFTHEAKGADDAADADTAIINAEGGQNNSEEKKEYFI

SEQ ID NO: 576 - protein, 111 aa, Homo sapiens
MIDIQKDTAVEGEEIEVNCTAMASKPATTIRWFKGNTELKGKSEVEEWSDMYTVTSQLMLKVHKEDDGVPVICQVEHPAVTGNLQTQRYLEVQYKPQVHIQMTYPLQGLTR

SEQ ID NO: 577 - protein, 79 aa, Homo sapiens
MIDIQKDTAVEGEEIEVNCTAMASKPATTIRWFKGNTELKGKSEVEEWSDMYTVTSQLMLKVHKEDDGVPVICQVEHPA

SEQ ID NO: 578 - protein, 413 aa, Homo sapiens
  misc_feature (1)..(1): Xaa can be any naturally occurring amino acid
XSVVLPSGSQCAAAAAAAAPPGLRLRLLLLLFSAAALIPTGDGQNLFTKDVTVIEGEVATISCQVNKSDDSVIQLLNPNRQTIYFRDFRPLKDSRFQLLNFSSSELKVSLTNVSISDEGRYFCQLYTDPPQESYTTITVLVPPRNLMIDIQKDTAVEGEEIEVNCTAMASKPATTIRWFKGNTELKGKSEVEEWSDMYTVTSQLMLKVHKEDDGVPVICQVEHPAVTGNLQTQRYLEVQYKPQVHIQMTYPLQGLTREGDALELTCEAIGKPQPVMVTWVRVDDEMPQHAVLSGPNLFINNLNKTDNGTYRCEASNIVGKAHSDYMLYVYDSRAGEEGSIRAVDHAVIGGVVAVVVFAMLCLLIILGRYFARHKGTYFTHEAKGADDAADADTAIINAEGGQNNSEEKKEYFI

SEQ ID NO: 579 - protein, 346 aa, Homo sapiens
GDGQNLFTKDVTVIEGEVATISCQVNKSDDSVIQLLNPNRQTIYFRDFRPLKDSRFQLLNFSSSELKVSLTNVSISDEGRYFCQLYTDPPQESYTTITVLVPPRNLMIDIQKDTAVEGEEIEVNCTAMASKPATTIRWFKGNTELKGKSEVEEWSDMYTVTSQLMLKVHKEDDGVPVICQVEHPAVTGNLQTQRYLEVQYKPQVHIQMTYPLQGLTREGDALELTCEAIGKPQPVMVTWVRVDDEMPQHAVLSGPNLFINNLNKTDNGTYRCEASNIVGKAHSDYMLYVYDSRAGEEGSIRAVDHAVIGGVVAVVVFAMLCLLIILGRYFARHKGLFSLTSSPRIK

SEQ ID NO: 580 - protein, 373 aa, Homo sapiens
GDGQNLFTKDVTVIEGEVATISCQVNKSDDSVIQLLNPNRQTIYFRDFRPLKDSRFQLLNFSSSELKVSLTNVSISDEGRYFCQLYTDPPQESYTTITVLVPPRNLMIDIQKDTAVEGEEIEVNCTAMASKPATTIRWFKGNTELKGKSEVEEWSDMYTVTSQLMLKVHKEDDGVPVICQVEHPAVTGNLQTQRYLEVQYKPQVHIQMTYPLQGLTREGDALELTCEAIGKPQPVMVTWVRVDDEMPQHAVLSGPNLFINNLNKTDNGTYRCEASNIVGKAHSDYMLYVYDSRAGEEGSIRAVDHAVIGGVVAVVVFAMLCLLIILGRYFARHKGTYFTHEAKGADDAADADTAIINAEGGQNNSEEKKEYFI

SEQ ID NO: 581 - protein, 412 aa, Homo sapiens
GDGQNLFTKDVTVIEGEVATISCQVNKSDDSVIQLLNPNRQTIYFRDFRPLKDSRFQLLNFSSSELKVSLTNVSISDEGRYFCQLYTDPPQESYTTITVLVPPRNLMIDIQKDTAVEGEEIEVNCTAMASKPATTIRWFKGNTELKGKSEVEEWSDMYTVTSQLMLKVHKEDDGVPVICQVEHPAVTGNLQTQRYLEVQYKPQVHIQMTYPLQGLTREGDALELTCEAIGKPQPVMVTWVRVDDEMPQHAVLSGPNLFINNLNKTDNGTYRCEASNIVGKAHSDYMLYVYDPPTTIPPPTTTTTTTTTTTTTILTIITDTTATTEPAVHDSRAGEEGSIRAVDHAVIGGVVAVVVFAMLCLLIILGRYFARHKGTYFTHEAKGADDAADADTAIINAEGGQNNSEEKKEYFI

SEQ ID NO: 582 - protein, 430 aa, Homo sapiens
GDGQNLFTKDVTVIEGEVATISCQVNKSDDSVIQLLNPNRQTIYFRDFRPLKDSRFQLLNFSSSELKVSLTNVSISDEGRYFCQLYTDPPQESYTTITVLVPPRNLMIDIQKDTAVEGEEIEVNCTAMASKPATTIRWFKGNTELKGKSEVEEWSDMYTVTSQLMLKVHKEDDGVPVICQVEHPAVTGNLQTQRYLEVQYKPQVHIQMTYPLQGLTREGDALELTCEAIGKPQPVMVTWVRVDDEMPQHAVLSGPNLFINNLNKTDNGTYRCEASNIVGKAHSDYMLYVYDPPTTIPPPTTTTTTTTTTTTTILTIITDTTATTEPAVHGLTQLPNSAEELDSEDLSDSRAGEEGSIRAVDHAVIGGVVAVVVFAMLCLLIILGRYFARHKGTYFTHEAKGADDAADADTAIINAEGGQNNSEEKKEYFI

SEQ ID NO: 583 - protein, 401 aa, Homo sapiens
GDGQNLFTKDVTVIEGEVATISCQVNKSDDSVIQLLNPNRQTIYFRDFRPLKDSRFQLLNFSSSELKVSLTNVSISDEGRYFCQLYTDPPQESYTTITVLVPPRNLMIDIQKDTAVEGEEIEVNCTAMASKPATTIRWFKGNTELKGKSEVEEWSDMYTVTSQLMLKVHKEDDGVPVICQVEHPAVTGNLQTQRYLEVQYKPQVHIQMTYPLQGLTREGDALELTCEAIGKPQPVMVTWVRVDDEMPQHAVLSGPNLFINNLNKTDNGTYRCEASNIVGKAHSDYMLYVYDPPTTIPPPTTTTTTTTTTTTTILTIITDSRAGEEGSIRAVDHAVIGGVVAVVVFAMLCLLIILGRYFARHKGTYFTHEAKGADDAADADTAIINAEGGQNNSEEKKEYFI

SEQ ID NO: 584 - protein, 200 aa, Homo sapiens
MASSLTCTGVIWALLSFLCAATSCVGFFMPYWLWGSQLGKPVSFGTFRRCSYPVHDESRQMMVMVEECGRYASFQGIPSAEWRICTIVTGLGCGLLLLVALTALMGCCVSDLISRTVGRVAGGIQFLGGLLIGAGCALYPLGWDSEEVRQTCGYTSGQFDLGKCEIGWAYYCTGAGATAAMLLCTWLACFSGKKQKHYPY

SEQ ID NO: 585 - protein, 554 aa, Homo sapiens
MTAPGAAGRCPPTTWLGSLLLLVCLLASRSITEEVSEYCSHMIGSGHLQSLQRLIDSQMETSCQITFEFVDQEQLKDPVCYLKKAFLLVQDIMEDTMRFRDNTPNAIAIVQLQELSLRLKSCFTKDYEEHDKACVRTFYETPLQLLEKVKNVFNETKNLLDKDWNIFSKNCNNSFAECSSQDVVTKPDCNCLYPKAIPSSDPASVSPHQPLAPSMAPVAGLTWEDSEGTEGSSLLPGEQPLHTVDPGSAKQRPPRSTCQSFEPPETPVVKDSTIGGSPQPRPSVGAFNPGMEDILDSAMGTNWVPEEASGEASEIPVPQGTELSPSRPGGGSMQTEPARPSNFLSASSPLPASAKGQQPADVTGTALPRVGPVRPTGQDWNHTPQKTDHPSALLRDPPEPGSPRISSLRPQGLSNPSTLSAQPQLSRSHSSGSVLPLGELEGRRSTRDRRSPAEPEGGPASEGAARPLPRFNSVPLTDTGHERQSEGSFSPQLQESVFHLLVPSVILVLLAVGGLLFYRWRRRSHQEPQRADSPLEQPEGSPLTQDDRQVELPV

SEQ ID NO: 586 - protein, 119 aa, Homo sapiens
MTAPGAAGRCPPTTWLGSLLLLVCLLASRSITEEVSEYCSHMIGSGHLQSLQRLIDSQMETSCQITFEFVDQEQLKDPVCYLKKAFLLVQDIMEDTMRFRDNTPNAIAIVQLQELSLRL

SEQ ID NO: 587 - protein, 438 aa, Homo sapiens
MTAPGAAGRCPPTTWLGSLLLLVCLLASRSITEEVSEYCSHMIGSGHLQSLQRLIDSQMETSCQITFEFVDQEQLKDPVCYLKKAFLLVQDIMEDTMRFRDNTPNAIAIVQLQELSLRLKSCFTKDYEEHDKACVRTFYETPLQLLEKVKNVFNETKNLLDKDWNIFSKNCNNSFAECSSQDVVTKPDCNCLYPKAIPSSDPASVSPHQPLAPSMAPVAGLTWEDSEGTEGSSLLPGEQPLHTVDPGSAKQRPPRSTCQSFEPPETPVVKDSTIGGSPQPRPSVGAFNPGMEDILDSAMGTNWVPEEASGEASEIPVPQGTELSPSRPGGGSMQTEPARPSNFLSASSPLPASAKGQQPADVTGHERQSEGSFSPQLQESVFHLLVPSVILVLLAVGGLLFYRWRRRSHQEPQRADSPLEQPEGSPLTQDDRQVELPV

SEQ ID NO: 588 - protein, 554 aa, Homo sapiens; identical to SEQ ID NO: 585

SEQ ID NO: 589 - protein, 256 aa, Homo sapiens
MTAPGAAGRCPPTTWLGSLLLLVCLLASRSITEEVSEYCSHMIGSGHLQSLQRLIDSQMETSCQITFEFVDQEQLKDPVCYLKKAFLLVQDIMEDTMRFRDNTPNAIAIVQLQELSLRLKSCFTKDYEEHDKACVRTFYETPLQLLEKVKNVFNETKNLLDKDWNIFSKNCNNSFAECSSQGHERQSEGSFSPQLQESVFHLLVPSVILVLLAVGGLLFYRWRRRSHQEPQRADSPLEQPEGSPLTQDDRQVELPV

SEQ ID NO: 590 - protein, 285 aa, Homo sapiens
MTAPGAAGRCPPTIDSQMETSCQITFEFVDQEQLKDPVCYLKKAFLLVQDIMEDTMRFRDNTPNAIAIVQLQELSLRLKSCFTKDYEEHDKACVRTFYETPLQLLEKVKNVFNETKNLLDKDWNIFSKNCNNSFAECSSQDVVTKPDCNCLYPKAIPSSDPASVSPHQPLAPSMAPVAGLTWEDSEGTEGSSLLPGEQPLHTVDPGSAKQRPPRSTCQSFEPPETPVVKDSTIGGSPQPRPSVGAFNPGMEDILDSAMGTNWVPEEASGEASEIPVPQGTELSPS

SEQ ID NO: 591 - protein, 113 aa, Homo sapiens
MIGSGHLQSLQRLIDSQMETSCQITFEFVDQEQLKDPVCYLKKAFLLVQDIMEDTMRFRDNTPNAIAIVQLQELSLRLKSCFTKDYEEHDKACVRTFYETPLQLLEKVKNVFN

SEQ ID NO: 592 - protein, 150 aa, Homo sapiens
MGWGRLQRISLPSQCLSLLSTWLGSLLLLVCLLASRSITEEVSEYCSHMIGSGHLQSLQRLIDSQMETSCQITFEFVDQEQLKDPVCYLKKAFLLVQDIMEDTMRFRDNTPNAIAIVQLQELSLRLKSCFTKDYEEHDKACVRTFYETPL

SEQ ID NO: 593 - protein, 173 aa, Homo sapiens
MARMNRPAPVEVSYKHMRFLITHNPTNATLSTFIEDLKKYGATTVVRVCEVTYDKTPLEKDGITVVDWPFDDGAPPPGKVVEDWLSLVKAKFCEAPGSCVAVHCVAGLGRAPVLVALALIESGMKYEDAIQFIRQKRRGAINSKQLTYLEKYRPKQRLRFKDPHTHKTRCCVM

SEQ ID NO: 594 - protein, 148 aa, Homo sapiens
MARMNRPAPVEVSYKHMRFLITHNPTNATLSTFIEDLKKYGATTVVRVCEVTYDKTPLEKDGITVVDWPFDDGAPPPGKVVEDWLSLVKAKFCEAPGSCVAVHCVAGLGRKRRGAINSKQLTYLEKYRPKQRLRFKDPHTHKTRCCVM

SEQ ID NO: 595 - protein, 148 aa, Homo sapiens; identical to SEQ ID NO: 594

SEQ ID NO: 596 - protein, 173 aa, Homo sapiens; identical to SEQ ID NO: 593

SEQ ID NO: 597 - protein, 70 aa, Homo sapiens
MARMNRPAPVEVSYKHMRFLITHNPTNATLSTFIEDLKKYGATTVVRVCEVTYDKTPLEKDGITVVDWPF

SEQ ID NO: 598 - protein, 87 aa, Homo sapiens
MARMNRPAPVEVSYKHMRFLITHNPTNATLSTFIESGMKYEDAIQFIRQKRRGAINSKQLTYLEKYRPKQRLRFKDPHTHKTRCCVM

SEQ ID NO: 599 - protein, 25 aa, Homo sapiens
MINACRDFLELAEIHSRKWQRALQY

SEQ ID NO: 600 - protein, 244 aa, Homo sapiens
MELTIFILRLAIYILTFPLYLLNFLGLWSWICKKWFPYFLVRFTVIYNEQMASKKRELFSNLQEFAGPSGKLSLLEVGCGTGANFKFYPPGCRVTCIDPNPNFEKFLIKSIAENRHLQFERFVVAAGENMHQVADGSVDVVVCTLVLCSVKNQERILREVCRVLRPGGAFYFMEHVAAECSTWNYFWQQVLDPAWHLLFDGCNLTRESWKALERASFSKLKLQHIQAPLSWELVRPHIYGYAVK

SEQ ID NO: 601 - protein, 244 aa, Homo sapiens; identical to SEQ ID NO: 600

SEQ ID NO: 602 - protein, 244 aa, Homo sapiens; identical to SEQ ID NO: 600

SEQ ID NO: 603 - protein, 244 aa, Homo sapiens
  misc_feature (1)..(1): Xaa can be any naturally occurring amino acid
XELTIFILRLAIYILTFPLYLLNFLGLWSWICKKWFPYFLVRFTVIYNEQMASKKRELFSNLQEFAGPSGKLSLLEVGCGTGANFKFYPPGCRVTCIDPNPNFEKFLIKSIAENRHLQFERFVVAAGENMHQVADGSVDVVVCTLVLCSVKNQERILREVCRVLRPGGAFYFMEHVAAECSTWNYFWQQVLDPAWHLLFDGCNLTRESWKALERASFSKLKLQHIQAPLSWELVRPHIYGYAVK

SEQ ID NO: 604 - protein, 180 aa, Homo sapiens
MELTIFILRLAIYILTFPLYLLNFLGLWSWICKKWFPYFLVRFTVIYNEQMASKKRELFSNLQEFAGPSGKLSLLEVGCGTGANFKFYPPGCRVTCIDPNPNFEKFLIKSIAENRHLQFERFVVAAGENMHQVADGSVDVVVCTLVLCSVKNQERILREVCRVLRPGGAFYFMEHVAAEC

SEQ ID NO: 605 - protein, 811 aa, Homo sapiens
MLLLFHSKRMPVAEAPQVAGGQGDGGDGEEAEPEGMFKACEDSKRKARGYLRLVPLFVLLALLVLASAGVLLWYFLGYKAEVMVSQVYSGSLRVLNRHFSQDLTRRESSAFRSETAKAQKMLKELITSTRLGTYYNSSSVYSFGEGPLTCFFWFILQIPEHRRLMLSPEVVQALLVEELLSTVNSSAAVPYRAEYEVDPEGLVILEASVKDIAALNSTLGCYRYSYVGQGQVLRLKGPDHLASSCLWHLQGPKDLMLKLRLEWTLAECRDRLAMYDVAGPLEKRLITSVYGCSRQEPVVEVLASGAIMAVVWKKGLHSYYDPFVLSVQPVVFQACEVNLTLDNRLDSQGVLSTPYFPSYYSPQTHCSWHLTVPSLDYGLALWFDAYALRRQKYDLPCTQGQWTIQNRRLCGLRILQPYAERIPVVATAGITINFTSQISLTGPGVRVHYGLYNQSDPCPGEFLCSVNGLCVPACDGVKDCPNGLDERNCVCRATFQCKEDSTCISLPKVCDGQPDCLNGSDEEQCQEGVPCGTFTFQCEDRSCVKKPNPQCDGRPDCRDGSDEEHCDCGLQGPSSRIVGGAVSSEGEWPWQASLQVRGRHICGGALIADRWVITAAHCFQEDSMASTVLWTVFLGKVWQNSRWPGEVSFKVSRLLLHPYHEEDSHDYDVALLQLDHPVVRSAAVRPVCLPARSHFFEPGLHCWITGWGALREGGPISNALQKVDVQLIPQDLCSEVYRYQVTPRMLCAGYRKGKKDACQGDSGGPLVCKALSGRWFLAGLVSWGLGCGRPNYFGVYTRITGVISWIQQVVT

SEQ ID NO: 606 - protein, 824 aa, Homo sapiens
MPVAEAPQVAGGQGDGGDGEEAEPEGMFKACEDSKRKARGYLRLVPLFVLLALLVLASAGVLLWYFLGYKAEVMVSQVYSGSLRVLNRHFSQDLTRRESSAFRSETAKAQKMLKELITSTRLGTYYNSSSVYSFGEGPLTCFFWFILQIPEHRRLMLSPEVVQALLVEELLSTVNSSAAVPYRAEYEVDPEGLVILEASVKDIAALNSTLGCYRYSYVGQGQVLRLKGPDHLASSCLWHLQGPKDLMLKLRLEWTLAECRDRLAMYDVAGPLEKRLITSVYGCSRQEPVVEVLASGAIMAVVWKKGLHSYYDPFVLSVQPVVFQACEVNLTLDNRLDSQGVLSTPYFPSYYSPQTHCSWHLTVPSLDYGLALWFDAYALRRQKYDLPCTQGQWTIQNRRLCGLRILQPYAERIPVVATAGITINFTSQISLTGPGVRVHYGLYNQSDPCPGEFLCSVNGLCVPACDGVKDCPNGLDERNCVCRATFQCKEDSTCISLPKVCDGQPDCLNGSDEEQCQEGVPCGTFTFQCEDRSCVKKPNPQCDGRPDCRDGSDEEHCDCGLQGPSSRIVGGAVSSEGEWPWQASLQVRGRHICGGALIADRWVITAAHCFQEDSMASTVLWTVFLGKVWQNSRWPGEVSFKVSRLLLHPYHEEDSHDYDVALLQLDHPVVRSAAVRPVCLPARSHFFEPGLHCWITGWGALREGALRADAVALFYGWRNQGSETCCCPISNALQKVDVQLIPQDLCSEVYRYQVTPRMLCAGYRKGKKDACQGDSGGPLVCKALSGRWFLAGLVSWGLGCGRPNYFGVYTRITGVISWIQQVVT

SEQ ID NO: 607 - protein, 802 aa, Homo sapiens
MPVAEAPQVAGGQGDGGDGEEAEPEGMFKACEDSKRKARGYLRLVPLFVLLALLVLASAGVLLWYFLGYKAEVMVSQVYSGSLRVLNRHFSQDLTRRESSAFRSETAKAQKMLKELITSTRLGTYYNSSSVYSFGEGPLTCFFWFILQIPEHRRLMLSPEVVQALLVEELLSTVNSSAAVPYRAEYEVDPEGLVILEASVKDIAALNSTLGCYRYSYVGQGQVLRLKGPDHLASSCLWHLQGPKDLMLKLRLEWTLAECRDRLAMYDVAGPLEKRLITSVYGCSRQEPVVEVLASGAIMAVVWKKGLHSYYDPFVLSVQPVVFQACEVNLTLDNRLDSQGVLSTPYFPSYYSPQTHCSWHLTVPSLDYGLALWFDAYALRRQKYDLPCTQGQWTIQNRRLCGLRILQPYAERIPVVATAGITINFTSQISLTGPGVRVHYGLYNQSDPCPGEFLCSVNGLCVPACDGVKDCPNGLDERNCVCRATFQCKEDSTCISLPKVCDGQPDCLNGSDEEQCQEGVPCGTFTFQCEDRSCVKKPNPQCDGRPDCRDGSDEEHCDCGLQGPSSRIVGGAVSSEGEWPWQASLQVRGRHICGGALIADRWVITAAHCFQEDSMASTVLWTVFLGKVWQNSRWPGEVSFKVSRLLLHPYHEEDSHDYDVALLQLDHPVVRSAAVRPVCLPARSHFFEPGLHCWITGWGALREGGPISNALQKVDVQLIPQDLCSEVYRYQVTPRMLCAGYRKGKKDACQGDSGGPLVCKALSGRWFLAGLVSWGLGCGRPNYFGVYTRITGVISWIQQVVT

SEQ ID NO: 608 - protein, 824 aa, Homo sapiens; identical to SEQ ID NO: 606

SEQ ID NO: 609 - protein, 141 aa, Homo sapiens
MPVAEAPQVAGGQGDGGDGEEAEPEGMFKACEDSKRKARGYLRLVPLFVLLALLVLASAGVLLWYFLGYKAEVMVSQVYSGSLRVLNRHFSQDLTRRESSAFRSETAKAQKMLKELITSTRLGTYYNSSSVYSFGEGPLTC

SEQ ID NO: 610 - protein, 71 aa, Homo sapiens
LTLDNRLDSQGVLSTPYFPSYYSPQTHCSWHLTVPSLDYGLALWFDAYALRRQKYDLPCTQGQWTIQNRRV

SEQ ID NO: 611 - protein, 461 aa, Homo sapiens
MLLLFHSKRMPVAEAPQVAGGQGDGGDGEEAEPEGMFKACEDSKRKARGYLRLVPLFVLLALLVLASAGVLLWYFLGYKAEVMVSQVYSGSLRVLNRHFSQDLTRRESSAFRSETAKAQKMLKELITSTRLGTYYNSSSVYSFGEGPLTCFFWFILQIPEHRRLMLSPEVVQALLVEELLSTVNSSAAVPYRAEYEVDPEGLVILEASVKDIAALNSTLGCYRYSYVGQGQVLRLKGPDHLASSCLWHLQGPKDLMLKLRLEWTLAECRDRLAMYDVAGPLEKRLITSVYGCSRQEPVVEVLASGAIMAVVWKKGLHSYYDPFVLSVQPVVFQACEVNLTLDNRLDSQGVLSTPYFPSYYSPQTHCSWHLTVPSLDYGLALWFDAYALRRQKYDLPCTQGQWTIQNRRYHFLSSLWLPFLPPPPSLPSSIVTPSLEAQVPNLRGAARGASRGWGWCQACCP

SEQ ID NO: 612 - protein, 428 aa, Homo sapiens
MLRTLLRRRLFSYPTKYYFMVLVLSLITFSVLRIHQKPEFVSVRHLELAGENPSSDINCTKVLQGDVNEIQKVKLEILTVKFKKRPRWTPDDYINMTSDCSSFIKRRKYIVEPLSKEEAEFPIAYSIVVHHKIEMLDRLLRAIYMPQNFYCIHVDTKSEDSYLAAVMGIASCFSNVFVASRLESVVYASWSRVQADLNCMKDLYAMSANWKYLINLCGMDFPIKTNLEIVRKLKLLMGENNLETERMPSHKEERWKKRYEVVNGKLTNTGTVKMLPPLETPLFSGSAYFVVSREYVGYVLQNEKIQKLMEWAQDTYSPDEYLWATIQRIPEVPGSLPASHKYDLSDMQAVARFVKWQYFEGDVSKGAPYPPCDGVHVRSVCIFGAGDLNWMLRKHHLFANKFDVDVDLFAIQCLDEHLRHKALETLKH

SEQ ID NO: 613 - protein, 428 aa, Homo sapiens; identical to SEQ ID NO: 612

SEQ ID NO: 614 - protein, 428 aa, Homo sapiens; identical to SEQ ID NO: 612

SEQ ID NO: 615 - protein, 219 aa, Homo sapiens
MPRGRKSRRRRNARAAEENRNNRKIQASEASETPMAASVVASTPEDDLSGPEEDPSTPEEASTTPEEASSTAQAQKPSVPRSNFQGTKKSLLMSILALIFIMGNSAKEALVWKVLGKLGMQPGRQHSIFGDPKKIVTEEFVRRGYLIYKPVPRSSPVEYEFFWGPRAHVESSKLKVMHFVARVRNRCSKDWPCNYDWDSDDDAEVEAILNSGARGYSAP

SEQ ID NO: 616 - protein, 85 aa, Homo sapiens
MGPRQGRWWLLLWLPPLATLPVRGEAAAAALSVRRCKALKEKDLIRTSESDCYCYNQNSQVEWKYIWSTMQGDCVLLCGACQEDI

SEQ ID NO: 617 - protein, 417 aa, Homo sapiens
MGPRQGRWWLLLWLPPLATLPVRGEAAAAALSVRRCKALKEKDLIRTSESDCYCYNQNSQVEWKYIWSTMQVKITSPGLFRIVYIAERHNCQYPENILSFIKCVIHNFWIPKESNEITIIINPYRETVCFSVEPVKKIFNYMIHVNRNIMDFKLFLVFVAGVFLFFYARTLSQSPTFYYSSGTVLGVLMTLVFVLLLVKRFIPKYSTFWALMVGCWFASVYIVCQLMEDLKWLWYENRIYVLGYVLIVGFFSFVVCYKHGPLADDRSRSLLMWMLRLLSLVLVYAGVAVPQFAYAAIILLMSSWSLHYPLRACSYMRWKMEQWFTSKELVVKYLTEDEYREQADAETNSALEELRRACRKPDFPSWLVVSRLHTPSKFADFVLGGSHLSPEEISLHEEQYGLGGAFLEEQLFNPSTA

SEQ ID NO: 618 - protein, 138 aa, Homo sapiens
MQVKITSPGLFRIVYIAERHNCQYPENILSFIKCVIHNFWIPKESNEITIIINPYRETVCFSVEPVKKIFNYMIHVNRNIMDFKLFLVFVAGVFLFFYARTLSQSPTFYYSSGTVLGVLMTLVFVLLLVKRFIPKAMS

SEQ ID NO: 619 - protein, 24 aa, Homo sapiens
MQVKITSPGLFRIVYIAERHNCQY

SEQ ID NO: 620 - protein, 35 aa, Homo sapiens
DCYCYNQNSQVEWKYIWSTMQGDCVLLCGACQEDI

SEQ ID NO: 621 - protein, 422 aa, Homo sapiens
MLHLLALFLHCLPLASGDYDICKSWVTTDEGPTWEFYACQPKVMRLKDYVKVKVEPSGITCGDPPERFCSHENPYLCSNECDASNPDLAHPPRLMFDKEEEGLATYWQSITWSRYPSPLEANITLSWNKTVELTDDVVMTFEYGRPTVMVLEKSLDNGRTWQPYQFYAEDCMEAFGMSARRARDMSSSSAHRVLCTEEYSRWAGSKKEKHVRFEVRDRFAIFAGPDLRNMDNLYTRLESAKGLKEFFTLTDLRMRLLRPALGGTYVQRENLYKYFYAISNIEVIGRCKCNLHANLCSMREGSLQCECEHNTTGPDCGKCKKNFRTRSWRAGSYLPLPHGSPNACATAGSFGTLQTPPPGRSPSALRGSRRGLANVKEPAGSRPQISEMLLGCTVTLHQGSVGPHIPPKLSLPDPGGPWLGSQ

SEQ ID NO: 622 - protein, 530 aa, Homo sapiens
MLHLLALFLHCLPLASGDYDICKSWVTTDEGPTWEFYACQPKVMRLKDYVKVKVEPSGITCGDPPERFCSHENPYLCSNECDASNPDLAHPPRLMFDKEEEGLATYWQSITWSRYPSPLEANITLSWNKTVELTDDVVMTFEYGRPTVMVLEKSLDNGRTWQPYQFYAEDCMEAFGMSARRARDMSSSSAHRVLCTEEYSRWAGSKKEKHVRFEVRDRFAIFAGPDLRNMDNLYTRLESAKGLKEFFTLTDLRMRLLRPALGGTYVQRENLYKYFYAISNIEVIGRCKCNLHANLCSMREGSLQCECEHNTTGPDCGKCKKNFRTRSWRAGSYLPLPHGSPNACATAGSFGNCECYGHSNRCSYIDFLNVVTCVSCKHNTRGQHCQHCRLGYYRNGSAELDDENVCIECNCNQIGSVHDRCNETGFCECREGAAGPKCDDCLPTHYWRQGCYPNVCDDDQLLCQNGGTCLQNQRCACPRGYTGVRCEQPRCDPADDDGGLDCDRAPGAAPRPATLLGCLLLLGLAARLGR

SEQ ID NO: 623 - protein, 211 aa, Homo sapiens [sequence omitted]

SEQ ID NO: 624 - protein, 205 aa, Homo sapiens
QRQAAALGSQSPSPAGLRAGAVPPARACLQEAEIPREVIERLARSQIHSIRDLQRLLEIDSVGSEDSLDTSLRAHGVHATKHVPEKRPLPIRRKRSIEEAVPAVCKTRTVIYEIPRSQVDPTSANFLIWPPCVEVKRCTGCCNTSSVKCQPSRVHHRSVKVAKVEYVRKKPKLKEVQVRLEEHLECACATTSLNPDYREEDTDVR

SEQ ID NO: 625 - protein, 196 aa, Homo sapiens
MRTLACLLLLGCGYLAHVLAEEAEIPREVIERLARSQIHSIRDLQRLLEIDSVGSEDSLDTSLRAHGVHATKHVPEKRPLPIRRKRSIEEAVPAVCKTRTVIYEIPRSQVDPTSANFLIWPPCVEVKRCTGCCNTSSVKCQPSRVHHRSVKVAKVEYVRKKPKLKEVQVRLEEHLECACATTSLNPDYREEDTDVR

SEQ ID NO: 626 - protein, 86 aa, Homo sapiens
MRTLACLLLLGCGYLAHVLAEEAEIPREVIERLARSQIHSIRDLQRLLEIDSVGSEDSLDTSLRAHGVHATKHVPEKRPLPIRRKR

SEQ ID NO: 627 - protein, 273 aa, Homo sapiens
MIFLLLMLSLELQLHQIAALFTVTVPKELYIIEHGSNVTLECNFDTGSHVNLGAITASLQKVENDTSPHRERATLLEEQLPLGKASFHIPQVQVRDEGQYQCIIIYGVAWDYKYLTLKVKASYRKINTHILKVPETDEVELTCQATGYPLAEVSWPNVSVPANTSHSRTPEGLYQVTSVLRLKPPPGRNFSCVFWNTHVRELTLASIDLQSQMEPRTHPTWLLHIFIPFCIIAFIFIATVIALRKQLCQKLYSSKDTTKRPVTTTKREVNSAI

SEQ ID NO: 628 - protein, 423 aa, Homo sapiens
MDRGQPSLEPAAAAPRASGRCVIAPVRAVLRLRRRVCVLRKRRLLQPGGGPDVGTGAPRPGCSPRAPRADLDQPKFFTFDSPAELPSRTPRKKRRRSRLVLYPETSRKYRPRVEHRSRAQRCLLLLVAIVGFQVLNAIENLDDNAQRYDLDGLEKALQRAVFGQPAAVSRIVALMRDYLATHVHSRPLLLALHGPSGVGKSHVGRLLARHFRSVLEDSALVLQYHARHHCPEARAAQDCREELARRVADVVARAEAEEKTPLLVLDDVELMPRPLLDELHGFLQPQRSHHFHNAIYVLLSGAGGAEVTRFVLQNASRALPLRPDGFRSAEAAAAQAEEDLRASLLAVLSREHPLWQAAAIVPFLLLDKRDVVSCFRDEMAGEGFFPDQARAENLAAQLSFYRVAGREFAVTGCKQVVATVNLL

SEQ ID NO: 629 - protein, 69 aa, Homo sapiens
  misc_feature (1)..(1): Xaa can be any naturally occurring amino acid
XISEAEKAKQKIAPVFFREEYMLNNAVGSCQKPYVALIHGITMGGDCSLMWVEVISCHDSKENLVTSLH

SEQ ID NO: 630 - protein, 52 aa, Homo sapiens
DVGGGYFLPRLQGKLGYFLALTGFRLKGRDVYRAGIATHFVDSEKNGDDTIT

SEQ ID NO: 631 - protein, 793 aa, Homo sapiens
MLRGGRRGQLGWHSWAAGPGSLLAWLILASAGAAPCPDACCPHGSSGLRCTRDGALDSLHHLPGAENLTELYIENQQHLQHLELRDLRGLGELRNLTIVKSGLRFVAPDAFHFTPRLSRLNLSFNALESLSWKTVQGLSLQELVLSGNPLHCSCALRWLQRWEEEGLGGVPEQKLQCHGQGPLAHMPNASCGVPTLKVQVPNASVDVGDDVLLRCQVEGRGLEQAGWILTELEQSATVMKSGGLPSLGLTLANVTSDLNRKNVTCWAENDVGRAEVSVQVNVSFPASVQLHTAVEMHHWCIPFSVDGQPAPSLRWLFNGSVLNETSFIFTEFLEPAANETVRHGCLRLNQPTHVNNGNYTLLAANPFGQASASIMAAFMDNPFEFNPEDPIPDTNSTSGDPVEKKDETPFGVSVAVGLAVFACLFLSTLLLVLNKCGRRNKFGINRPAVLAPEDGLAMSLHFMTLGGSSLSPTEGKGSGLQGHIIENPQYFSDASPSGVHHIKRRDIVLKWELGEGAFGKVFLAECHNLLPEQDKMLVAVKALKEASESARQDFQREAELLTMLQHQHIVRFFGVCTEGRPLLMVFEYMRHGDLNRFLRSHGPDAKLLAGGEDVAPGPLGLGQLLAVASQVAAGMVYLAGLHFVHRDLATRNCLVGQGLVVKIGDFGMSRDIYSTDYYRVGGRTMLPIRWMPPESILYRKFTTESDVWSFGVVLWEIFTYGKQPWYQLSNTEAIDCITQGRELERPRACPPEVYAIMRGCWQREPQQRHSIKDVHARLQALAQAPPVYLDVLG

SEQ ID NO: 632 - protein, 790 aa, Homo sapiens
MLRGGRRGQLGWHSWAAGPGSLLAWLILASAGAAPCPDACCPHGSSGLRCTRDGALDSLHHLPGAENLTELYIENQQHLQHLELRDLRGLGELRNLTIVKSGLRFVAPDAFHFTPRLSRLNLSFNALESLSWKTVQGLSLQELVLSGNPLHCSCALRWLQRWEEEGLGGVPEQKLQCHGQGPLAHMPNASCGVPTLKVQVPNASVDVGDDVLLRCQVEGRGLEQAGWILTELEQSATVMKSGGLPSLGLTLANVTSDLNRKNVTCWAENDVGRAEVSVQVNVSFPASVQLHTAVEMHHWCIPFSVDGQPAPSLRWLFNGSVLNETSFIFTEFLEPAANETVRHGCLRLNQPTHVNNGNYTLLAANPFGQASASIMAAFMDNPFEFNPEDPIPDTNSTSGDPVEKKDETPFGVSVAVGLAVFACLFLSTLLLVLNKCGRRNKFGINRPAVLAPEDGLAMSLHFMTLGGSSLSPTEGKGSGLQGHIIENPQYFSDACVHHIKRRDIVLKWELGEGAFGKVFLAECHNLLPEQDKMLVAVKALKEASESARQDFQREAELLTMLQHQHIVRFFGVCTEGRPLLMVFEYMRHGDLNRFLRSHGPDAKLLAGGEDVAPGPLGLGQLLAVASQVAAGMVYLAGLHFVHRDLATRNCLVGQGLVVKIGDFGMSRDIYSTDYYRVGGRTMLPIRWMPPESILYRKFTTESDVWSFGVVLWEIFTYGKQPWYQLSNTEAIDCITQGRELERPRACPPEVYAIMRGCWQREPQQRHSIKDVHARLQALAQAPPVYLDVLG

SEQ ID NO: 633 - protein, 760 aa, Homo sapiens
MKEAALICLAPSVPPILTVKSWDTMQLRAARSRCTNLLAASYIENQQHLQHLELRDLRGLGELRNLTIVKSGLRFVAPDAFHFTPRLSRLNLSFNALESLSWKTVQGLSLQELVLSGNPLHCSCALRWLQRWEEEGLGGVPEQKLQCHGQGPLAHMPNASCGVPTLKVQVPNASVDVGDDVLLRCQVEGRGLEQAGWILTELEQSATVMKSGGLPSLGLTLANVTSDLNRKNVTCWAENDVGRAEVSVQVNVSFPASVQLHTAVEMHHWCIPFSVDGQPAPSLRWLFNGSVLNETSFIFTEFLEPAANETVRHGCLRLNQPTHVNNGNYTLLAANPFGQASASIMAAFMDNPFEFNPEDPIPDTNSTSGDPVEKKDETPFGVSVAVGLAVFACLFLSTLLLVLNKCGRRNKFGINRPAVLAPEDGLAMSLHFMTLGGSSLSPTEGKGSGLQGHIIENPQYFSDACVHHIKRRDIVLKWELGEGAFGKVFLAECHNLLPEQDKMLVAVKALKEASESARQDFQREAELLTMLQHQHIVRFFGVCTEGRPLLMVFEYMRHGDLNRFLRSHGPDAKLLAGGEDVAPGPLGLGQLLAVASQVAAGMVYLAGLHFVHRDLATRNCLVGQGLVVKIGDFGMSRDIYSTDYYRVGGRTMLPIRWMPPESILYRKFTTESDVWSFGVVLWEIFTYGKQPWYQLSNTEAIDCITQGRELERPRACPPEVYAIMRGCWQREPQQRHSIKDVHARLQALAQAPPVYLDVLG

SEQ ID NO: 634 - protein, 388 aa, Homo sapiens
MKEAALICLAPSVPPILTVKSWDTMQLRAARSRCTNLLAASYIENQQHLQHLELRDLRGLGELRNLTIVKSGLRFVAPDAFHFTPRLSRLNLSFNALESLSWKTVQGLSLQELVLSGNPLHCSCALRWLQRWEEEGLGGVPEQKLQCHGQGPLAHMPNASCGVPTLKVQVPNASVDVGDDVLLRCQVEGRGLEQAGWILTELEQSATVMSRPVCSCTRRWRCTTGASPSLWMGSRHRLCAGSSMAPCSMRPASSSLSSWSRQPMRPCGTGVCASTSPPTSTTATTRCWLPTPSARPPPPSWLPSWTTLSSSTPRTPSLTLTAHLETRWRRRTKHLLGSRWLWAWPSLPASSFLRCSLCSTNVDGETSLGSTARLCWLQRMGWPCPCIS

SEQ ID NO: 635 - protein, 796 aa, Homo sapiens
MLRGGRRGQLGWHSWAAGPGSLLAWLILASAGAAPCPDACCPHGSSGLRCTRDGALDSLHHLPGAENLTELYIENQQHLQHLELRDLRGLGELRNLTIVKSGLRFVAPDAFHFTPRLSRLNLSFNALESLSWKTVQGLSLQELVLSGNPLHCSCALRWLQRWEEEGLGGVPEQKLQCHGQGPLAHMPNASCGVPTLKVQVPNASVDVGDDVLLRCQVEGRGLEQAGWILTELEQSATVMKSGGLPSLGLTLANVTSDLNRKNVTCWAENDVGRAEVSVQVNVSFPASVQLHTAVEMHHWCIPFSVDGQPAPSLRWLFNGSVLNETSFIFTEFLEPAANETVRHGCLRLNQPTHVNNGNYTLLAANPFGQASASIMAAFMDNPFEFNPEDPIPVSFSPVDTNSTSGDPVEKKDETPFGVSVAVGLAVFACLFLSTLLLVLNKCGRRNKFGINRPAVLAPEDGLAMSLHFMTLGGSSLSPTEGKGSGLQGHIIENPQYFSDACVHHIKRRDIVLKWELGEGAFGKVFLAECHNLLPEQDKMLVAVKALKEASESARQDFQREAELLTMLQHQHIVRFFGVCTEGRPLLMVFEYMRHGDLNRFLRSHGPDAKLLAGGEDVAPGPLGLGQLLAVASQVAAGMVYLAGLHFVHRDLATRNCLVGQGLVVKIGDFGMSRDIYSTDYYRVGGRTMLPIRWMPPESILYRKFTTESDVWSFGVVLWEIFTYGKQPWYQLSNTEAIDCITQGRELERPRACPPEVYAIMRGCWQREPQQRHSIKDVHARLQALAQAPPVYLDVLG

SEQ ID NO: 636 - protein, 131 aa, Homo sapiens
MSKRYLQKATKGKLLIIIFIVTLWGKVVSSANHHKAHHVKTGTCEVVALHRCCNKNKIEERSQTVKCSCFPGQVAGTTRAAPSCVDASIVEQKWWCHMQPCLEGEECKVLPDRKGWSCSSGNKVKTTRVTH

SEQ ID NO: 637 - protein, 87 aa, Homo sapiens
MMSKRYLQKATKGKLLIIIFIVTLWGKVVSSANHHKAHHVKTGTCEVVALHRCCNKNKIEERSQTVKCSCFPGQVAGTTRAAPSCVD

SEQ ID NO: 638 - protein, 131 aa, Homo sapiens
MSKRYLQKATKGKLLIIIFIVTLWGKVVSSANHHKAHHVKTGTCEVVALHRCCNKNKIEERSQTVKCSCFPGQVAGTTRAAPSCVDASIVEQKWWCHMQPCLEGEECKVLPDRKGWSCSSGNKVKTTRANV

SEQ ID NO: 639 - protein, 101 aa, Homo sapiens
MVTPITRMSKRYLQKATKGKLLIIIFIVTLWGKVVSSANHHKAHHVKTGTCEVVALHRCCNKNKIEERSQTVKCSCFPGQVAGTTRAAPSCVDASIVEQKW

SEQ ID NO: 640 - protein, 34 aa, Homo sapiens
MQPCLEGEECKVLPDRKGWSCSSGNKVKTTRVTH

SEQ ID NO: 641 - protein, 49 aa, Homo sapiens
MSKRYLQKATKGKLLIIIFIVTLWGKVVSSANHHKGNPLTQEKSSDPQG

SEQ ID NO: 642 - protein, 131 aa, Homo sapiens; identical to SEQ ID NO: 636

SEQ ID NO: 643 - protein, 110 aa, Homo sapiens
MMSKRYLQKATKGKLLIIIFIVTLWGKVVSSANHHKAHHVKTGTCEVVALHRCCNKNKIEERSQTVKCSCFPGQVAGTTRAAPSCVDASIVEQKWWCHMQPCLEGEECKV

SEQ ID NO: 644 - protein, 2229 aa, Homo sapiens
MFPGCPRLWVLVVLGTSWVGWGSQGTEAAQLRQFYVAAQGISWSYRPEPTNSSLNLSVTSFKKIVYREYEPYFKKEKPQSTISGLLGPTLYAEVGDIIKVHFKNKADKPLSIHPQGIRYSKLSEGASYLDHTFPAEKMDDAVAPGREYTYEWSISEDSGPTHDDPPCLTHIYYSHENLIEDFNSGLIGPLLICKKGTLTEGGTQKTFDKQIVLLFAVFDESKSWSQSSSLMYTVNGYVNGTMPDITVCAHDHISWHLLGMSSGPELFSIHFNGQVLEQNHHKVSAITLVSATSTTANMTVGPEGKWIISSLTPKHLQAGMQAYIDIKNCPKKTRNLKKITREQRRHMKRWEYFIAAEEVIWDYAPVIPANMDKKYRSQHLDNFSNQIGKHYKKVMYTQYEDESFTKHTVNPNMKEDGILGPIIRAQVRDTLKIVFKNMASRPYSIYPHGVTFSPYEDEVNSSFTSGRNNTMIRAVQPGETYTYKWNILEFDEPTENDAQCLTRPYYSDVDIMRDIASGLIGLLLICKSRSLDRRGIQRAADIEQQAVFAVFDENKSWYLEDNINKFCENPDEVKRDDPKFYESNIMSNFTLSAINGYVPESITTLGFCFDDTVQWHFCSVGTQNEILTIHFTGHSFIYGKRHEDTLTLFPMRGESVTVTMDNVGTWMLTSMNSSPRSKKLRLKFRDVKCIPDDDEDSYEIFEPPESTVMATRKMHDRLEPEDEESDADYDYQNRLAAALGIRSFRNSSLNQEEEEFNLTALALENGTEFVSSNTDIIVGSNYSSPSNISKFTVNNLAEPQKAPSHQQATTAGSPLRHLIGKNSVLNSSTAEHSSPYSEDPIEDPLQPDVTGIRLLSLGAGEFKSQEHAKHKGPKVERDQAAKHRFSWMKLLAHKVGRHLSQDTGSPSGMRPWEDLPSQDTGSPSRMRPWKDPPSDLLLLKQSNSSKILVGRWHLASEKGSYEIIQDTDEDTAVNNWLISPQNASRAWGESTPLANKPGKQSGHPKFPRVRHKSLQVRQDGGKSRLKKSQFLIKTRKKKKEKHTHHAPLSPRTFHPLRSEAYNTFSERRLKHSLVLHKSNETSLPTDLNQTLPSMDFGWIASLPDHNQNSSNDTGQASCPPGLYQTVPPEEHYQTFPIQDPDQMHSTSDPSHRSSSPELSEMLEYDRSHKSFPTDISQMSPSSEHEVWQTVISPDLSQVTLSPELSQTNLSPDLSHTTLSPELIQRNLSPALGQMPISPDLSHTTLSPDLSHTTLSLDLSQTNLSPELSQTNLSPALGQMPLSPDLSHTTLSLDFSQTNLSPELSHMTLSPELSQTNLSPALGQMPISPDLSHTTLSLDFSQTNLSPELSQTNLSPALGQMPLSPDPSHTTLSLDLSQTNLSPELSQTNLSPDLSEMPLFADLSQIPLTPDLDQMTLSPDLGETDLSPNFGQMSLSPDLSQVTLSPDISDTTLLPDLSQISPPPDLDQIFYPSESSQSLLLQEFNESFPYPDLGQMPSPSSPTLNDTFLSKEFNPLVIVGLSKDGTDYIEIIPKEEVQSSEDDYAEIDYVPYDDPYKTDVRTNINSSRDPDNIAAWYLRSNNGNRRNYYIAAEEISWDYSEFVQRETDIEDSDDIPEDTTYKKVVFRKYLDSTFTKRDPRGEYEEHLGILGPIIRAEVDDVIQVRFKNLASRPYSLHAHGLSYEKSSEGKTYEDDSPEWFKEDNAVQPNSSYTYVWHATERSGPESPGSACRAWAYYSAVNPEKDIHSGLIGPLLICQKGILHKDSNMPMDMREFVLLFMTFDEKKSWYYEKKSRSSWRLTSSEMKKSHEFHAINGMIYSLPGLKMYEQEWVRLHLLNIGGSQDIHVVHFHGQTLLENGNKQHQLGVWPLLPGSFKTLEMKASKPGWWLLNTEVGENQRAGMQTPFLIMDRDCRMPMGLSTGIISDSQIKASEFLGYWEPRLARLNNGGSYNAWSVEKLAAEFASKPWIQVDMQKEVIITGIQTQGAKHYLKSCYTTEFYVAYSSNQINWQIFKGNSTRNVMYFNGNSDASTIKENQFDPPIVARYIRISPTRAYNRPTLRLELQGCEVNGCSTPLGMENGKIENKQITASSFKKSWWGDYWEPFRARLNAQGRVNAWQAKANNNKQWLEIDLLKIKKITAIITQGCKSLSSEMYVKSYTIHYSEQGVEWKPYRLKSSMVDKIFEGNTNTKGHVKNFFNPPIISRFIRVIPKTWNQSIALRLELFGCDIY

SEQ ID NO: 645 - protein, 2224 aa, Homo sapiens
MFPGCPRLWVLVVLGTSWVGWGSQGTEAAQLRQFYVAAQGISWSYRPEPTNSSLNLSVTSFKKIVYREYEPYFKKEKPQSTISGLLGPTLYAEVGDIIKVHFKNKADKPLSIHPQGIRYSKLSEGASYLDHTFPAEKMDDAVAPGREYTYEWSISEDSGPTHDDPPCLTHIYYSHENLIEDFNSGLIGPLLICKKGTLTEGGTQKTFDKQIVLLFAVFDESKSWSQSSSLMYTVNGYVNGTMPDITVCAHDHISWHLLGMSSGPELFSIHFNGQVLEQNHHKVSAITLVSATSTTANMTVGPEGKWIISSLTPKHLQAGMQAYIDIKNCPKKTRNLKKITREQRRHMKRWEYFIAAEEVIWDYAPVIPANMDKKYRSQHLDNFSNQIGKHYKKVMYTQYEDESFTKHTVNPNMKEDGILGPIIRAQVRDTLKIVFKNMASRPYSIYPHGVTFSPYEDEVNSSFTSGRNNTMIRAVQPGETYTYKWNILEFDEPTENDAQCLTRPYYSDVDIMRDIASGLIGLLLICKSRSLDRRGIQRAADIEQQAVFAVFDENKSWYLEDNINKFCENPDEVKRDDPKFYESNIMSTINGYVPESITTLGFCFDDTVQWHFCSVGTQNEILTIHFTGHSFIYGKRHEDTLTLFPMRGESVTVTMDNVGTWMLTSMNSSPRSKKLRLKFRDVKCIPDDDEDSYEIFEPPESTVMATRKMHDRLEPEDEESDADYDYQNRLAAALGIRSFRNSSLNQEEEEFNLTALALENGTEFVSSNTDIIVGSNYSSPSNISKFTVNNLAEPQKAPSHQQATTAGSPLRHLIGKNSVLNSSTAEHSSPYSEDPIEDPLQPDVTGIRLLSLGAGEFKSQEHAKHKGPKVERDQAAKHRFSWMKLLAHKVGRHLSQDTGSPSGMRPWEDLPSQDTGSPSRMRPWKDPPSDLLLLKQSNSSKILVGRWHLASEKGSYEIIQDTDEDTAVNNWLISPQNASRAWGESTPLANKPGKQSGHPKFPRVRHKSLQVRQDGGKSRLKKSQFLIKTRKKKKEKHTHHAPLSPRTFHPLRSEAYNTFSERRLKHSLVLHKSNETSLPTDLNQTLPSMDFGWIASLPDHNQNSSNDTGQASCPPGLYQTVPPEEHYQTFPIQDPDQMHSTSDPSHRSSSPELSEMLEYDRSHKSFPTDISQMSPSSEHEVWQTVISPDLSQVTLSPELSQTNLSPDLSHTTLSPELIQRNLSPALGQMPISPDLSHTTLSPDLSHTTLSLDLSQTNLSPELSQTNLSPALGQMPLSPDLSHTTLSLDFSQTNLSPELSHMTLSPELSQTNLSPALGQMPISPDLSHTTLSLDFSQTNLSPELSQTNLSPALGQMPLSPDPSHTTLSLDLSQTNLSPELSQTNLSPDLSEMPLFADLSQIPLTPDLDQMTLSPDLGETDLSPNFGQMSLSPDLSQVTLSPDISDTTLLPDLSQISPPPDLDQIFYPSESSQSLLLQEFNESFPYPDLGQMPSPSSPTLNDTFLSKEFNPLVIVGLSKDGTDYIEIIPKEEVQSSEDDYAEIDYVPYDDPYKTDVRTNINSSRDPDNIAAWYLRSNNGNRRNYYIAAEEISWDYSEFVQRETDIEDSDDIPEDTTYKKVVFRKYLDSTFTKRDPRGEYEEHLGILGPIIRAEVDDVIQVRFKNLASRPYSLHAHGLSYEKSSEGKTYEDDSPEWFKEDNAVQPNSSYTYVWHATERSGPESPGSACRAWAYYSAVNPEKDIHSGLIGPLLICQKGILHKDSNMPMDMREFVLLFMTFDEKKSWYYEKKSRSSWRLTSSEMKKSHEFHAINGMIYSLPGLKMYEQEWVRLHLLNIGGSQDIHVVHFHGQTLLENGNKQHQLGVWPLLPGSFKTLEMKASKPGWWLLNTEVGENQRAGMQTPFLIMDRDCRMPMGLSTGIISDSQIKASEFLGYWEPRLARLNNGGSYNAWSVEKLAAEFASKPWIQVDMQKEVIITGIQTQGAKHYLKSCYTTEFYVAYSSNQINWQIFKGNSTRNVMYFNGNSDASTIKENQFDPPIVARYIRISPTRAYNRPTLRLELQGCEVNGCSTPLGMENGKIENKQITASSFKKSWWGDYWEPFRARLNAQGRVNAWQAKANNNKQWLEIDLLKIKKITAIITQGCKSLSSEMYVKSYTIHYSEQGVEWKPYRLKSSMVDKIFEGNTNTKGHVKNFFNPPIISRFIRVIPKTWNQSIALRLELFGCDIY

SEQ ID NO: 646 - protein, 553 aa, Homo sapiens
MAASKKAVLGPLVGAVDQGTSSTRFLVFNSKTAELLSHHQVEIKQEFPREGWVEQDPKEILHSVYECIEKTCEKLGQLNIDISNIKAIGVSNQRETTVVWDKITGEPLYNAVVWLDLRTQSTVESLSKRIPGNNNFVKSKTGLPLSTYFSAVKLRWLLDNVRKVQKAVEEKRALFGTIDSWLIWSLTGGVNGGVHCTDVTNASRTMLFNIHSLEWDKQLCEFFGIPMEILPNVRSSSEIYGLMKAGALEGVPISGCLGDQSAALVGQMCFQIGQAKNTYGTGCFLLCNTGHKCVFSDHGLLTTVAYKLGRDKPVYYALEGSVAIAGAVIRWLRDNLGIIKTSEEIEKLAKEVGTSYGCYFVPAFSGLYAPYWEPSARGIICGLTQFTNKCHIAFAALEAVCFQTREILDAMNRDCGIPLSHLQVDGGMTSNKILMQLQADILYIPVVKPSMPETTALGAAMAAGAAEGVGVWSLEPEDLSAVTMERFEPQINAEESEIRYSTWKKAVMKSMGWVTTQSPESGDPSIFCSLPLGFFIVSSMVMLIGARYISGIP

SEQ ID NO: 647 - protein, 559 aa, Homo sapiens
MAASKKAVLGPLVGAVDQGTSSTRFLVFNSKTAELLSHHQVEIKQEFPREGWVEQDPKEILHSVYECIEKTCEKLGQLNIDISNIKAIGVSNQRETTVVWDKITGEPLYNAVVWLDLRTQSTVESLSKRIPGNNNFVKSKTGLPLSTYFSAVKLRWLLDNVRKVQKAVEEKRALFGTIDSWLIWSLTGGVNGGVHCTDVTNASRTMLFNIHSLEWDKQLCEFFGIPMEILPNVRSSSEIYGLMKISHSVKAGALEGVPISGCLGDQSAALVGQMCFQIGQAKNTYGTGCFLLCNTGHKCVFSDHGLLTTVAYKLGRDKPVYYALEGSVAIAGAVIRWLRDNLGIIKTSEEIEKLAKEVGTSYGCYFVPAFSGLYAPYWEPSARGIICGLTQFTNKCHIAFAALEAVCFQTREILDAMNRDCGIPLSHLQVDGGMTSNKILMQLQADILYIPVVKPSMPETTALGAAMAAGAAEGVGVWSLEPEDLSAVTMERFEPQINAEESEIRYSTWKKAVMKSMGWVTTQSPESGDPSIFCSLPLGFFIVSSMVMLIGARYISGIP

SEQ ID NO: 648 - protein, 41 aa, Homo sapiens
SARVAKFRCCLIPDSDSITCIPLKPAFSGMAPDVAYSTPTS

SEQ ID NO: 649 - protein, 57 aa, Homo sapiens
MRLHYRYKEASGYFHTLRAVMRNPEEDGKDTLQCIAEMLQITKQAMGSDLPIIEKKL

SEQ ID NO: 650 - protein, 183 aa, Homo sapiens
MPRSHRPPPTAQRAATAAAAEPKSEGVVAMTFKIFLLFAGLMVKVPVGLYFSCKLLLFQSLMLMSPEDSGFYATIVAVVGLHVQQFSECTLIDATHRDVDVLLLLSNSAYYVAYYDDEVDKVNQYQRLSLENLEKIEIGPEPTLFGKPKFSCMRLHYRYKEASGYFHTLRAVMRNPEEDGKDT

SEQ ID NO: 651 - protein, 145 aa, Homo sapiens
MSAVLLLALLGFILPLPGVQALLCQFGTVQHVWKVSDLPRQWTPKNTSCDSGLGCQDTLMLIESGPQVSLVLSKGCTEAKDQEPRVTEHRMGPGLSLISYTFVCRQEDFCNNLVNSLPLWAPQPPADPMMGAAEGPFGKAEQVDS

SEQ ID NO: 652 - protein, 139 aa, Homo sapiens
MSAVLLLALLGFILPLPGVQALLCQFGTVQHVWKVSDLPRQWTPKNTSCDSGLGCQDTLMLIESGPQVSLVLSKGCTEAKDQEPRVTEHRMGPGLSLISYTFVCRQEDFCNNLVNSLPLWAPQPPAGACGRVGRRGRGC

SEQ ID NO: 653 - protein, 437 aa, Homo sapiens
MSAVLLLALLGFILPLPGVQALLCQFGTVQHVWKVSDLPRQWTPKNTSCDSGLGCQDTLMLIESGPQVSLVLSKGCTEAKDQEPRVTEHRMGPGLSLISYTFVCRQEDFCNNLVNSLPLWAPQPPADPGSLRCPVCLSMEGCLEGTTEEICPKGTTHCYDGLLRLRGGGIFSNLRVQGCMPQPVCNLLNGTQEIGPVGMTENCDMKDFLTCHRGTTIMTHGNLAQEPTDWTTSNTEMCEVGQVCQETLLLLDVGLTSTLVGTKGCSTVGAQNSQKTTIHSAPPGVLVASYTHFCSSDLCNSASSSSVLLNSLPPQAAPVPGDRQCPTCVQPLGTCSSGSPRMTCPRGATHCYDGYIHLSGGGLSTKMSIQGCVAQPSSFLLNHTRQIGIFSAREKRDVQPPASQHEGGGAEGLESLTWGVGLALAPALWWGVVCPSC

SEQ ID NO: 654 - protein, 131 aa, Homo sapiens
MAGVKALVALSFSGAIGLTFLMLGCALEDYGVYWPLFVLIFHAISPIPHFIAKRVTYDSDATSSACRELAYFFTTGIVVSAFGFPVILARVAVIKWGACGLVLAGNAVIFLTIQGFFLIFGRGDDFSWEQW

SEQ ID NO: 655 - protein, 140 aa, Homo sapiens
MRDGKGFLQGFLYFALVALSFSGAIGLTFLMLGCALEDYGVYWPLFVLIFHAISPIPHFIAKRVTYDSDATSSACRELAYFFTTGIVVSAFGFPVILARVAVIKWGACGLVLAGNAVIFLTIQGFFLIFGRGDDFSWEQW

SEQ ID NO: 656 - protein, 140 aa, Homo sapiens
MQFGELLAAVRKAQANVMLFLEEKEQAALSQANGIKAHLEYRSAEMEKSKQELERMAAISNTVQFLEMRMTSRLTRTQHTSISGCRRRTARSPTPRPGSIPTRTSPAGSCTGGRCCPSRVCTCTGTILRWRSSGQAPMLA

SEQ ID NO: 657 - protein, 205 aa, Homo sapiens
MTPPERLFLPRVCGTTLHLLLLGLLLVLLPGAQGLPGVGLTPSAAQTARQHPKMHLAHSTLKPAAHLIGDPSKQNSLLWRANTDRAFLQDGFSLSNNSLLVPTSGIYFVYSQVVFSGKAYSPKATSSPLYLAHEVQLFSSQYPFHVPLLSSQKMVYPGLQEPWLHSMYHGAAFQLTQGDQLSTHTDGIPHLVLSPSTVFFGAFAL

SEQ ID NO: 658 - protein, 205 aa, Homo sapiens; identical to SEQ ID NO: 657

SEQ ID NO: 659 - protein, 1015 aa, Homo sapiens
MLTALAPPALPGIPRQLPTAPARRQDSSGSSGSYYTAPGSPEPPDVGPDAKGPANWPWVAPGRGAGAQPRLSVSAQNSRQRHGPGSGFPRGPGSGPRPPQPQLRTLPSGEMEVIFGVGPLFGCSGADDREAQQQFTEPAFISPLPPGPASPAAVPRQSQVPDGGSRWATYLELRPRGPSPAAPAQFECVEVALEEGAAPARPRTVPKRQIELRPRPQSPPRAAGAPRPRLLLRTGSLDESLGPLQAAAGFVQTALARKLSPEAPAPSSATFGSTGRSEPETRETARSTHVVLEKAKSRPLRVRDNSAPAKAPRPWPSLRERAIRRDKPAPGTEPLGPVSSSIFLQSEEKIQEARKTRFPREAPDRTVQRARSPPFECRIPSEVPSRAVRPRSPSPPRQTPNGAVRGPRCPSPQNLSPWDRTTRRVSSPLFPEASSEWENQNPAVEETVSRRSPSPPILSQWNQCVAGERSPSLEAPSLWEIPHSAVADAVEPRSSPSPPAFFPWEAPDRPIGTWGPSPQETWDPMGPGSSIAFTQEAQNGLTQEELAPPTPSAPGTPEPTEMQSPSTREISDLAFGGSQQSPEVAAPEPPGSHPVGTLDADKCPEVLGPGEAASGRPRMAIPRPRDVRKLVKTTYAPGFPAGAQGSGLPAPPADPCGEEGGESKTQEPPALGPPAPAHYTSVFIKDFLPVVPHPYEPPEPSFDTVARDASQPNGVLRRRAENSTAKPFKRTEIRLPGALALGRRPEVTSRVRARGPGGENRDVEAQRLVPDGDGRTSPLGGARSSSQRSPVGPAGVRSPRPGSPQMQASPSPGIAPKPKTPPTAPEPAAAVQAPLPREPLALAGRTAPAQPRAASAPPTDRSPQSPSQGARRQPGAAPLGKVLVDPESGRYYFVEAPRQPRLRVLFDPESGQYVEVLLPPSSPGPPHRVYTPLALGLGLYPPAYGPIPSLSLPPSPGPQALGSPQLPWVSEAGPLDGTYYLPVSGTPNPAPPLLLCAPPSSSGPTQPGKGSLFPL

SEQ ID NO: 660 - protein, 418 aa, Homo sapiens
MDMLHPSSVSTTSEPENASSAWPPDATLGNVSAGPSPAGLAVSGVLIPLVYLVVCVVGLLGNSLVIYVVLRHTASPSVTNVYILNLALADELFMLGLPFLAAQNALSYWPFGSLMCRLVMAVDGINQFTSIFCLTVMSVDRYLAVVHPTRSARWRTAPVARTVSAAVWVASAVVVLPVVVFSGVPRGMSTCHMQWPEPAAAWRAGFIIYTAALGFFGPLLVICLCYLLIVVKVRSAGRRVWAPSCQRRRRSERRVTRMVVAVVALFVLCWMPFYVLNIVNVVCPLPEEPAFFGLYFLVVALPYANSCANPILYGFLSYRFKQGFRRVLLRPSRRVRSQEPTVGPPEKTEEEDEEEEDGEESREGGKGKEMNGRVSQITQPGTSGQERPPSRVASKEQQLLPQEASTGEKSSTMRISYL

SEQ ID NO: 661 - protein, 418 aa, Homo sapiens; identical to SEQ ID NO: 660

SEQ ID NO: 662 - protein, 526 aa, Homo sapiens
MGHLSAPLHRVRVPWQGLLLTASLLTFWNPPTTAQLTTESMPFNVAEGKEVLLLVHNLPQQLFGYSWYKGERVDGNRQIVGYAIGTQQATPGPANSGRETIYPNASLLIQNVTQNDTGFYTLQVIKSDLVNEEATGQFHVYPELPKPSISSNNSNPVEDKDAVAFTCEPETQDTTYLWWINNQSLPVSPRLQLSNGNRTLTLLSVTRNDTGPYECEIQNPVSANRSDPVTLNVTYGPDTPTISPSDTYYRPGANLSLSCYAASNPPAQYSWLINGTFQQSTQELFIPNITVNNSGSYTCHANNSVTGCNRTTVKTIIVTELSPVVAKPQIKASKTTVTGDKDSVNLTCSTNDTGISIRWFFKNQSLPSSERMKLSQGNTTLSINPVKREDAGTYWCEVFNPISKNQSDPIMLNVNYNALPQENGLSPGAIAGIVIGVVALVALIAVALACFLHFGKTGRASDQRDLTEHKPSVSNHTQDHSNDPPNKMNEVTYSTLNFEAQQPTQPTSASPSLTATEIIYSEVKKQ

SEQ ID NO: 663 - protein, 430 aa, Homo sapiens
MGHLSAPLHRVRVPWQGLLLTASLLTFWNPPTTAQLTTESMPFNVAEGKEVLLLVHNLPQQLFGYSWYKGERVDGNRQIVGYAIGTQQATPGPANSGRETIYPNASLLIQNVTQNDTGFYTLQVIKSDLVNEEATGQFHVYPELPKPSISSNNSNPVEDKDAVAFTCEPETQDTTYLWWINNQSLPVSPRLQLSNGNRTLTLLSVTRNDTGPYECEIQNPVSANRSDPVTLNVTYGPDTPTISPSDTYYRPGANLSLSCYAASNPPAQYSWLINGTFQQSTQELFIPNITVNNSGSYTCHANNSVTGCNRTTVKTIIVTDNALPQENGLSPGAIAGIVIGVVALVALIAVALACFLHFGKTGRASDQRDLTEHKPSVSNHTQDHSNDPPNKMNEVTYSTLNFEAQQPTQPTSASPSLTATEIIYSEVKKQ

SEQ ID NO: 664 - protein, 461 aa, Homo sapiens
MGHLSAPLHRVRVPWQGLLLTASLLTFWNPPTTAQLTTESMPFNVAEGKEVLLLVHNLPQQLFGYSWYKGERVDGNRQIVGYAIGTQQATPGPANSGRETIYPNASLLIQNVTQNDTGFYTLQVIKSDLVNEEATGQFHVYPELPKPSISSNNSNPVEDKDAVAFTCEPETQDTTYLWWINNQSLPVSPRLQLSNGNRTLTLLSVTRNDTGPYECEIQNPVSANRSDPVTLNVTYGPDTPTISPSDTYYRPGANLSLSCYAASNPPAQYSWLINGTFQQSTQELFIPNITVNNSGSYTCHANNSVTGCNRTTVKTIIVTERQNLTMLPRLDSNSWAQAILPSVSQSAEITDNALPQENGLSPGAIAGIVIGVVALVALIAVALACFLHFGKTGRASDQRDLTEHKPSVSNHTQDHSNDPPNKMNEVTYSTLNFEAQQPTQPTSASPSLTATEIIYSEVKKQ

SEQ ID NO: 665 - protein, 464 aa, Homo sapiens
MGHLSAPLHRVRVPWQGLLLTASLLTFWNPPTTAQLTTESMPFNVAEGKEVLLLVHNLPQQLFGYSWYKGERVDGNRQIVGYAIGTQQATPGPANSGRETIYPNASLLIQNVTQNDTGFYTLQVIKSDLVNEEATGQFHVYPELPKPSISSNNSNPVEDKDAVAFTCEPETQDTTYLWWINNQSLPVSPRLQLSNGNRTLTLLSVTRNDTGPYECEIQNPVSANRSDPVTLNVTYGPDTPTISPSDTYYRPGANLSLSCYAASNPPAQYSWLINGTFQQSTQELFIPNITVNNSGSYTCHANNSVTGCNRTTVKTIIVTELSPVVAKPQIKASKTTVTGDKDSVNLTCSTNDTGISIRWFFKNQSLPSSERMKLSQGNTTLSINPVKREDAGTYWCEVFNPISKNQSDPIMLNVNYNALPQENGLSPGAIAGIVIGVVALVALIAVALACFLHFGKTGSSGPLQ

SEQ ID NO: 666 - protein, 368 aa, Homo sapiens
MGHLSAPLHRVRVPWQGLLLTASLLTFWNPPTTAQLTTESMPFNVAEGKEVLLLVHNLPQQLFGYSWYKGERVDGNRQIVGYAIGTQQATPGPANSGRETIYPNASLLIQNVTQNDTGFYTLQVIKSDLVNEEATGQFHVYPELPKPSISSNNSNPVEDKDAVAFTCEPETQDTTYLWWINNQSLPVSPRLQLSNGNRTLTLLSVTRNDTGPYECEIQNPVSANRSDPVTLNVTYGPDTPTISPSDTYYRPGANLSLSCYAASNPPAQYSWLINGTFQQSTQELFIPNITVNNSGSYTCHANNSVTGCNRTTVKTIIVTDNALPQENGLSPGAIAGIVIGVVALVALIAVALACFLHFGKTGSSGPLQ

SEQ ID NO: 667 - protein, 94 aa, Homo sapiens
MPFNVAEGKEVLLLVHNLPQQLFGYSWYKGERVDGNRQIVGYAIGTQQATPGPANSGRETIYPNASLLIQNVTQNDTGFYTLQVIKSDLVNEEA

SEQ ID NO: 668 - protein, 399 aa, Homo sapiens
MGHLSAPLHRVRVPWQGLLLTASLLTFWNPPTTAQLTTESMPFNVAEGKEVLLLVHNLPQQLFGYSWYKGERVDGNRQIVGYAIGTQQATPGPANSGRETIYPNASLLIQNVTQNDTGFYTLQVIKSDLVNEEATGQFHVYPELPKPSISSNNSNPVEDKDAVAFTCEPETQDTTYLWWINNQSLPVSPRLQLSNGNRTLTLLSVTRNDTGPYECEIQNPVSANRSDPVTLNVTYGPDTPTISPSDTYYRPGANLSLSCYAASNPPAQYSWLINGTFQQSTQELFIPNITVNNSGSYTCHANNSVTGCNRTTVKTIIVTEMAFHHVAKAGLKLLSSSNPPASTSQSAKITDNALPQENGLSPGAIAGIVIGVVALVALIAVALACFLHFGKTGSSGPLQ

SEQ ID NO: 669 - protein, 99 aa, Homo sapiens
MPFNVAEGKEVLLLVHNLPQQLFGYSWYKGERVDGNRQIVGYAIGTQQATPGPANSGRETIYPNASLLIQNVTQNDTGFYTLQVIKSDLVNEEATGQFH

SEQ ID NO: 670 - protein, 174 aa, Homo sapiens
MACLGFQRHKAQLNLATRTWPCTLLFFLLFIPVFCKAMHVAQPAVVLASSRGIASFVCEYASPGKATEVRVTVLRQADSQVTEVCAATYMMGNELTFLDDSICTGTSSGNQVNLTIQGLRAMDTGLYICKVELMYPPPYYLGIGNGTQIYVIAKEKKPSYNRGLCENAPNRARM

SEQ ID NO: 671 - protein, 223 aa, Homo sapiens
MACLGFQRHKAQLNLATRTWPCTLLFFLLFIPVFCKAMHVAQPAVVLASSRGIASFVCEYASPGKATEVRVTVLRQADSQVTEVCAATYMMGNELTFLDDSICTGTSSGNQVNLTIQGLRAMDTGLYICKVELMYPPPYYLGIGNGTQIYVIDPEPCPDSDFLLWILAAVSSGLFFYSFLLTAVSLSKMLKKRSPLTTGVYVKMPPTEPECEKQFQPYFIPIN

SEQ ID NO: 672 - protein, 137 aa, Homo sapiens
MHVAQPAVVLASSRGIASFVCEYASPGKATEVRVTVLRQADSQVTEVCAATYMMGNELTFLDDSICTGTSSGNQVNLTIQGLRAMDTGLYICKVELMYPPPYYLGIGNGTQIYVIAKEKKPSYNRGLCENAPNRARM

SEQ ID NO: 673 - protein, 79 aa, Homo sapiens
MACLGFQRHKAQLNLATRTWPCTLLFFLLFIPVFCKAMHVAQPAVVLASSRGIASFVSKEKKPSYNRGLCENAPNRARM

SEQ ID NO: 674 - protein, 244 aa, Homo sapiens
MRWCLLLIWAQGLRQAPLASGMMTGTIETTGNISAEKGGSIILQCHLSSTTAQVTQVNWEQQDQLLAICNADLGWHISPSFKDRVAPGPGLGLTLQSLTVNDTGEYFCIYHTYPDGTYTGRIFLEVLESSVAEHGARFQIPLLGAMAATLVVICTAVIVVVALTRKKKALRIHSVEGDLRRKSAGQEEWSPSAPSPPGSCVQAEAAPAGLCGEQRGEDCAELHDYFNVLSYRSLGNCSFFTETG

SEQ ID NO: 675 - protein, 169 aa, Homo sapiens
MMTGTIETTGNISAEKGGSIILQCHLSSTTAQVTQVNWEQQDQLLAICNADLGWHISPSFKDRVAPGPGLGLTLQSLTVNDTGEYFCIYHTYPDGTYTGRIFLEVLESSVAEHGARFQIPLLGAMAATLVVICTAVIVVVALTRKKKALRIHSVEGDLRRKSAGQEEWS

SEQ ID NO: 676 - protein, 311 aa, Homo sapiens
MAFLVAHPMQFVYLLTTLCVFNMVFAKLGFSETVFSQRLSFTVLSAVGYFQWQKRPHLLPVGPLGRSMRWCLLLIWAQGLRQAPLASGMMTGTIETTGNISAEKGGSIILQCHLSSTTAQVTQVNWEQQDQLLAICNADLGWHISPSFKDRVAPGPGLGLTLQSLTVNDTGEYFCIYHTYPDGTYTGRIFLEVLESSVAEHGARFQIPLLGAMAATLVVICTAVIVVVALTRKKKALRIHSVEGDLRRKSAGQEEWSPSAPSPPGSCVQAEAAPAGLCGEQRGEDCAELHDYFNVLSYRSLGNCSFFTETG

SEQ ID NO: 677 - protein, 163 aa, Homo sapiens
MMTGTIETTGNISAEKGGSIILQCHLSSTTAQVTQVNWEQQDQLLAICNADLGWHISPSFKDRVAPGPGLGLTLQSLTVNDTGEYFCIYHTYPDGTYTGRIFLEVLESSVAEHGARFQIPLLGAMAATLVVICTAVIVVVALTRKKKALRIHSVEGDLRRKSA

SEQ ID NO: 678 - protein, 244 aa, Homo sapiens; identical to SEQ ID NO: 674

SEQ ID NO: 679 - protein, 263 aa, Homo sapiens
MDSYLLMWGLLTFIMVPGCQAELCDDDPPEIPHATFKAMAYKEGTMLNCECKRGFRRIKSGSLYMLCTGNSSHSSWDNQCQCTSSATRNTTKQVTPQPEEQKERKTTEMQSPMQPVDQASLPGHCREPPPWENEATERIYHFVVGQMVYYQCVQGYRALHRGPAESVCKMTHGKTRWTQPQLICTGEEKPQASPEGRPESETSCLVTTTDFQIQTEMAATMETSIFTTEYQVAVAGCVFLLISVLLLSGLTWQRRQRKSRRTI

SEQ ID NO: 680 - protein, 200 aa, Homo sapiens
MDSYLLMWGLLTFIMVPGCQAELCDDDPPEIPHATFKAMAYKEGTMLNCECKRGFRRIKSGSLYMLCTGNSSHSSWDNQCQCTSSATRNTTKQVTPQPEEQKERKTTEMQSPMQPVDQASLPGEEKPQASPEGRPESETSCLVTTTDFQIQTEMAATMETSIFTTEYQVAVAGCVFLLISVLLLSGLTWQRRQRKSRRTI

SEQ ID NO: 681 - protein, 272 aa, Homo sapiens
MDSYLLMWGLLTFIMVPGCQAELCDDDPPEIPHATFKAMAYKEGTMLNCECKRGFRRIKSGSLYMLCTGNSSHSSWDNQCQCTSSATRNTTKQVTPQPEEQKERKTTEMQSPMQPVDQASLPGHCREPPPWENEATERIYHFVVGQMVYYQCVQGYRALHRGPAESVCKMTHGKTRWTQPQLICTGEMETSQFPGEEKPQASPEGRPESETSCLVTTTDFQIQTEMAATMETSIFTTEYQVAVAGCVFLLISVLLLSGLTWQRRQRKSRRTI

SEQ ID NO: 682 - protein, 510 aa, Homo sapiens
MEDTKESNVKTFCSKNILAILGFSSIIAVIALLAVGLTQNKALPENVKYGIVLDAGSSHTSLYIYKWPAEKENDTGVVHQVEECRVKGPGISKFVQKVNEIGIYLTDCMERAREVIPRSQHQETPVYLGATAGMRLLRMESEELADRVLDVVERSLSNYPFDFQGARIITGQEEGAYGWITINYLLGKFSQKTRWFSIVPYETNNQETFGALDLGGASTQVTFVPQNQTIESPDNALQFRLYGKDYNVYTHSFLCYGKDQALWQKLAKDIQVASNEILRDPCFHPGYKKVVNVSDLYKTPCTKRFEMTLPFQQFEIQGIGNYQQCHQSILELFNTSYCPYSQCAFNGIFLPPLQGDFGAFSAFYFVMKFLNLTSEKVSQEKVTEMMKKFCAQPWEEIKTSYAGVKEKYLSEYCFSGTYILSLLLQGYHFTADSWEHIHFIGKIQGSDAGWTLGYMLNLTNMIPAEQPLSTPLSHSTYVFLMVLFSLVLFTVAIIGLLIFHKPSYFWKDMV

SEQ ID NO: 683 - protein, 522 aa, Homo sapiens
MGREELFLTFSFSSGFQESNVKTFCSKNILAILGFSSIIAVIALLAVGLTQNKALPENVKYGIVLDAGSSHTSLYIYKWPAEKENDTGVVHQVEECRVKGPGISKFVQKVNEIGIYLTDCMERAREVIPRSQHQETPVYLGATAGMRLLRMESEELADRVLDVVERSLSNYPFDFQGARIITGQEEGAYGWITINYLLGKFSQKTRWFSIVPYETNNQETFGALDLGGASTQVTFVPQNQTIESPDNALQFRLYGKDYNVYTHSFLCYGKDQALWQKLAKDIQVASNEILRDPCFHPGYKKVVNVSDLYKTPCTKRFEMTLPFQQFEIQGIGNYQQCHQSILELFNTSYCPYSQCAFNGIFLPPLQGDFGAFSAFYFVMKFLNLTSEKVSQEKVTEMMKKFCAQPWEEIKTSYAGVKEKYLSEYCFSGTYILSLLLQGYHFTADSWEHIHFIGKIQGSDAGWTLGYMLNLTNMIPAEQPLSTPLSHSTYVFLMVLFSLVLFTVAIIGLLIFHKPSYFWKDMV

SEQ ID NO: 684 - protein, 517 aa, Homo sapiens
MKGTKDLTSQQKESNVKTFCSKNILAILGFSSIIAVIALLAVGLTQNKALPENVKYGIVLDAGSSHTSLYIYKWPAEKENDTGVVHQVEECRVKGPGISKFVQKVNEIGIYLTDCMERAREVIPRSQHQETPVYLGATAGMRLLRMESEELADRVLDVVERSLSNYPFDFQGARIITGQEEGAYGWITINYLLGKFSQKTRWFSIVPYETNNQETFGALDLGGASTQVTFVPQNQTIESPDNALQFRLYGKDYNVYTHSFLCYGKDQALWQKLAKDIQVASNEILRDPCFHPGYKKVVNVSDLYKTPCTKRFEMTLPFQQFEIQGIGNYQQCHQSILELFNTSYCPYSQCAFNGIFLPPLQGDFGAFSAFYFVMKFLNLTSEKVSQEKVTEMMKKFCAQPWEEIKTSYAGVKEKYLSEYCFSGTYILSLLLQGYHFTADSWEHIHFIGKIQGSDAGWTLGYMLNLTNMIPAEQPLSTPLSHSTYVFLMVLFSLVLFTVAIIGLLIFHKPSYFWKDMV

SEQ ID NO: 685 - protein, 63 aa, Homo sapiens
MERAREVIPRSQHQETPVYLGATAGMRLLRVPGSLLAKRKVPMAGLLSTICWANSVRKQGGSA

SEQ ID NO: 686 - protein, 402 aa, Homo sapiens
MERAREVIPRSQHQETPVYLGATAGMRLLRMESEELADRVLDVVERSLSNYPFDFQGARIITGQEEGAYGWITINYLLGKFSQKTRWFSIVPYETNNQETFGALDLGGASTQVTFVPQNQTIESPDNALQFRLYGKDYNVYTHSFLCYGKDQALWQKLAKDIQVASNEILRDPCFHPGYKKVVNVSDLYKTPCTKRFEMTLPFQQFEIQGIGNYQQCHQSILELFNTSYCPYSQCAFNGIFLPPLQGDFGAFSAFYFVMKFLNLTSEKVSQEKVTEMMKKFCAQPWEEIKTSYAGVKEKYLSEYCFSGTYILSLLLQGYHFTADSWEHIHFIGKIQGSDAGWTLGYMLNLTNMIPAEQPLSTPLSHSTYVFLMVLFSLVLFTVAIIGLLIFHKPSYFWKDMV

SEQ ID NO: 687 - protein, 51 aa, Homo sapiens
MEDTKESNVKTFCSKNILAILGFSSIIAVIALLAVGLTQNKALPENVKDGK

SEQ ID NO: 688 - protein, 199 aa, Homo sapiens
MKSGLWYFFLFCLRIKVLTGEINGSANYEMFIFHNGGVQILCKYPDIVQQFKMQLLKGGQILCDLTKTKGSGNTVSIKSLKFCHSQLSNNSVSFFLYNLDHSHANYYFCNLSIFDPPPFKVTLTGGYLHIYESQLCCQLKFWLPIGCAAFVVVCILGCILICWLTKKKYSSSVHDPNGEYMFMRAVNTAKKSRLTDVTL

SEQ ID NO: 689 - protein, 168 aa, Homo sapiens
MKSGLWYFFLFCLRIKVLTGEINGSANYEMFIFHNGGVQILCKYPDIVQQFKMQLLKGGQILCDLTKTKGSGNTVSIKSLKFCHSQLSNNSVSFFLYNLDHSHANYYFCNLSIFDPPPFKVTLTGGYLHIYESQLCCQLKFWLPIGCAAFVVVCILGCILICWLTKKM

SEQ ID NO: 690 - protein, 277 aa, Homo sapiens
MCVGARRLGRGPCAALLLLGLGLSTVTGLHCVGDTYPSNDRCCHECRPGNGMVSRCSRSQNTVCRPCGPGFYNDVVSSKPCKPCTWCNLRSGSERKQLCTATQDTVCRCRAGTQPLDSYKPGVDCAPCPPGHFSPGDNQACKPWTNCTLAGKHTLQPASNSSDAICEDRDPPATQPQETQGPPARPITVQPTEAWPRTSQGPSTRPVEVPGGRAVAAILGLGLVLGLLGPLAILLALYLLRRDQRLPPDAHKPPGGGSFRTPIQEEQADAHSTLAKI

SEQ ID NO: 691 - protein, 255 aa, Homo sapiens
MAQHGAMGAFRALCGLALLCALSLGQRPTGGPGCGPGRLLLGTGTDARCCRVHTTRCCRDYPGEECCSEWDCMCVQPEFHCGDPCCTTCRHHPCPPGQGVQSQGKFSFGFQCIDCASGTFSGGHEGHCKPWTDCCWRCRRRPKTPEAASSPRKSGASDRQRRRGGWETCGCEPGRPPGPPTAASPSPGAPQAAGALRSALGRALLPWQQKWVQEGGSDQRPGPCSSAAAAGPCRRERETQSWPPSSLAGPDGVGS

SEQ ID NO: 692 - protein, 234 aa, Homo sapiens
MAQHGAMGAFRALCGLALLCALSLGQRPTGGPGCGPGRLLLGTGTDARCCRVHTTRCCRDYPGEECCSEWDCMCVQPEFHCGDPCCTTCRHHPCPPGQGVQSQGKFSFGFQCIDCASGTFSGGHEGHCKPWTDCTQFGFLTVFPGNKTHNAVCVPGSPPAEPLGWLTVVLLAVAACVLLLTSAQLGLHIWQLRKTQLLLEVPPSTEDARSCQFPEEERGERSAEEKGRLGDLWV

SEQ ID NO: 693 - protein, 241 aa, Homo sapiens
MAQHGAMGAFRALCGLALLCALSLGQRPTGGPGCGPGRLLLGTGTDARCCRVHTTRCCRDYPGEECCSEWDCMCVQPEFHCGDPCCTTCRHHPCPPGQGVQSQGKFSFGFQCIDCASGTFSGGHEGHCKPWTDCTQFGFLTVFPGNKTHNAVCVPGSPPAEPLGWLTVVLLAVAACVLLLTSAQLGLHIWQLRSQCMWPRETQLLLEVPPSTEDARSCQFPEEERGERSAEEKGRLGDLWV

SEQ ID NO: 694 - protein, 169 aa, Homo sapiens
MCVQPEFHCGDPCCTTCRHHPCPPGQGVQSQGKFSFGFQCIDCASGTFSGGHEGHCKPWTDCTQFGFLTVFPGNKTHNAVCVPGSPPAEPLGWLTVVLLAVAACVLLLTSAQLGLHIWQLRSQCMWPRETQLLLEVPPSTEDARSCQFPEEERGERSAEEKGRLGDLWV

SEQ ID NO: 695 - protein, 595 aa, Homo sapiens
MRVLLAALGLLFLGALRAFPQDRPFEDTCHGNPSHYYDKAVRRCCYRCPMGLFPTQQCPQRPTDCRKQCEPDYYLDEADRCTACVTCSRDDLVEKTPCAWNSSRVCECRPGMFCSTSAVNSCARCFFHSVCPAGMIVKFPGTAQKNTVCEPASPGVSPACASPENCKEPSSGTIPQAKPTPVSPATSSASTMPVRGGTRLAQEAASKLTRAPDSPSSVGRPSSDPGLSPTQPCPEGSGDCRKQCEPDYYLDEAGRCTACVSCSRDDLVEKTPCAWNSSRTCECRPGMICATSATNSCARCVPYPICAAETVTKPQDMAEKDTTFEAPPLGTQPDCNPTPENGEAPASTSPTQSLLVDSQASKTLPIPTSAPVALSSTGKPVLDAGPVLFWVILVLVVVVGSSAFLLCHRRACRKRIRQKLHLCYPVQTSQPKLELVDSRPRRSSTQLRSGASVTEPVAEERGLMSQPLMETCHSVGAAYLESLPLQDASPAGGPSSPRDLPEPRVSTEHTNNKIEKIYIMKADTVIVGTVKAELPEGRGLAGPAEPELEEELEADHTPHYPEQETEPPLGSCSDVMLSVEEEGKEDPLPTAASGK

SEQ ID NO: 696 - protein, 483 aa, Homo sapiens
MFCSTSAVNSCARCFFHSVCPAGMIVKFPGTAQKNTVCEPASPGVSPACASPENCKEPSSGTIPQAKPTPVSPATSSASTMPVRGGTRLAQEAASKLTRAPDSPSSVGRPSSDPGLSPTQPCPEGSGDCRKQCEPDYYLDEAGRCTACVSCSRDDLVEKTPCAWNSSRTCECRPGMICATSATNSCARCVPYPICAAETVTKPQDMAEKDTTFEAPPLGTQPDCNPTPENGEAPASTSPTQSLLVDSQASKTLPIPTSAPVALSSTGKPVLDAGPVLFWVILVLVVVVGSSAFLLCHRRACRKRIRQKLHLCYPVQTSQPKLELVDSRPRRSSTLRSGASVTEPVAEERGLMSQPLMETCHSVGAAYLESLPLQDASPAGGPSSPRDLPEPRVSTEHTNNKIEKIYIMKADTVIVGTVKAELPEGRGLAGPAEPELEEELEADHTPHYPEQETEPPLGSCSDVMLSVEEEGKEDPLPTAASGK

SEQ ID NO: 697 - protein, 55 aa, Homo sapiens
MRVLLAALGLLFLGALRAFPQGCSRHSSAHRGLLTAGSSVSLTTTWMRPTAVQPA

SEQ ID NO: 698 - protein, 176 aa, Homo sapiens
MRIFAVFIFMTYWHLLNAPYNKINQRILVVDPVTSEHELTCQAEGYPKAEVIWTSSDHQVLSGKTTTTNSKREEKLFNVTSTLRINTTTNEIFYCTFRRLDPEENHTAELVIPELPLAHPPNERTHLVILGAILLCLGVALTFIFRLRKGRMMDVKKCGIQDTNSKKQSDTHLEET

SEQ ID NO: 699 - protein, 290 aa, Homo sapiens
MRIFAVFIFMTYWHLLNAFTVTVPKDLYVVEYGSNMTIECKFPVEKQLDLAALIVYWEMEDKNIIQFVHGEEDLKVQHSSYRQRARLLKDQLSLGNAALQITDVKLQDAGVYRCMISYGGADYKRITVKVNAPYNKINQRILVVDPVTSEHELTCQAEGYPKAEVIWTSSDHQVLSGKTTTTNSKREEKLFNVTSTLRINTTTNEIFYCTFRRLDPEENHTAELVIPELPLAHPPNERTHLVILGAILLCLGVALTFIFRLRKGRMMDVKKCGIQDTNSKKQSDTHLEET

SEQ ID NO: 700 - protein, 551 aa, Homo sapiens
MAAPALSWRLPLLILLLPLATSWASAAVNGTSQFTCFYNSRANISCVWSQDGALQDTSCQVHAWPDRRRWNQTCELLPVSQASWACNLILGAPDSQKLTTVDIVTLRVLCREGVRWRVMAIQDFKPFENLRLMAPISLQVVHVETHRCNISWEISQASHYFERHLEFEARTLSPGHTWEEAPLLTLKQKQEWICLETLTPDTQYEFQVRVKPLQGEFTTWSPWSQPLAFRTKPAALGKDTIPWLGHLLVGLSGAFGFIILVYLLINCRNTGPWLKKVLKCNTPDPSKFFSQLSSEHGGDVQKWLSSPFPSSSFSPGGLAPEISPLEVLERDKVTQLLLQQDKVPEPASLSSNHSLTSCFTNQGYFFFHLPDALEIEACQVYFTYDPYSEEDPDEGVAGAPTGSSPQPLQPLSGEDDAYCTFPSRDDLLLFSPSLLGGPSPPSTAPGGSGAGEERMPPSLQERVPRDWDPQPLGPPTPGVPDLVDFQPPPELVLREAGEEVPDAGPREGVSFPWSRPPGQGEFRALNARLPLNTDAYLSLQELQGQDPTHLV

SEQ ID NO: 701 - protein, 146 aa, Homo sapiens
MAAPALSWRLPLLILLLPLATSWASAAVNGTSQFTCFYNSRANISCVWSQDGALQDTSCQVHAWPDRRRWNQTCELLPVSQASWACNLILGAPDSQKLTTVDIVTLRVLCREGVRWRVMAIQDFKPFENLRLMAPISLQVVHVETH

SEQ ID NO: 702 - protein, 88 aa, Homo sapiens
MAAPALSWRLPLLILLLPLATSWASAAVNGTSQFTCFYNSRANISCVWSQDGALQDTSCQVHAWPDRRRWNQTCELLPVSQASWACNL

SEQ ID NO: 703 - protein, 188 aa, Homo sapiens
MAAPALSWRLPLLILLLPLATSWASAAVNGTSQFTCFYNSRANISCVWSQDGALQDTSCQVHAWPDRRRWNQTCELLPVSQASWACNLILGAPDSQKLTTVDIVTLRVLCREGVRWRVMAIQDFKPFENLRLMAPISLQVVHVETHRCNISWEISQASHYFERHLEFEARTLSPGHTWEEAPLLTLKQ

SEQ ID NO: 704 - protein, 255 aa, Homo sapiens
MGNSCYNIVATLLLVLNFERTRSLQDPCSNCPAGTFCDNNRNQICSPCPPNSFSSAGGQRTCDICRQCKGVFRTRKECSSTSNAECDCTPGFHCLGAGCSMCEQDCKQGQELTKKGCKDCCFGTFNDQKRGICRPWTNCSLDGKSVLVNGTKERDVVCGPSPADLSPGASSVTPPAPAREPGHSPQIISFFLALTSTALLFLLFFLTLRFSVVKRGRKKLLYIFKQPFMRPVQTTQEEDGCSCRFPEEEEGGCEL

SEQ ID NO: 705 - protein, 87 aa, Homo sapiens
ERDVVCGPSPADLSPGASSVTPPAPAREPGHSPQIISFFLALTSTALLFLLFFLTLRFSVVKRGRKKLLYIFKQHGSSGDTFTILES

SEQ ID NO: 706 - protein, 255 aa, Homo sapiens; identical to SEQ ID NO: 704

SEQ ID NO: 707 - protein, 92 aa, Homo sapiens
MHCTLTMETEAIDGYITCDNELSPEREHSNMAIDLTSSTPNGQHASPSHMTSSKSSFYDFFLCVCVSPATDFNLLGLWGPLTLWYSYCYRFC

SEQ ID NO: 708 - DNA, 660 bp, Homo sapiens
atgcctcggggacgaaagagtcggcgccgccgtaatgcgagagccgcagaagagaaccgcaacaatcgcaaaatccaggcctcagaggcctccgagacccctatggccgcctctgtggtagcgagcacccccgaagacgacctgagcggccccgaggaagacccgagcactccagaggaggcctctaccacccctgaagaagcctcgagcactgcccaagcacaaaagccttcagtgccccggagcaattttcagggcaccaagaaaagtctcctgatgtctatattagcgctcatcttcatcatgggcaacagcgccaaggaagctctggtctggaaagtgctggggaagttaggaatgcagcctggacgtcagcacagcatctttggagatccgaagaagatcgtcacagaagagtttgtgcgcagagggtacctgatttataaaccggtgccccgtagcagtccggtggagtatgagttcttctgggggccccgagcacacgtggaatcgagcaaactgaaagtcatgcattttgtggcaagggttcgtaaccgatgctctaaagactggccttgtaattatgactgggattcggacgatgatgcagaggttgaggctatcctcaattcaggtgctaggggttattccgccccttaa

SEQ ID NO: 709 - protein, 219 aa, Homo sapiens; identical to SEQ ID NO: 615

SEQ ID NO: 710 - DNA, 64 bp, Artificial Sequence
  Adapter sequence
  misc_feature (35)..(40): n is a, c, g, or t
agatcggaagagcacacgtctgaactccagtcacnnnnnnatctcgtatgccgtcttctgcttg

SEQ ID NO: 711 - DNA, 58 bp, Artificial Sequence
  Adapter sequence
agatcggaagagcgtcgtgtagggaaagagtgtagatctcggtggtcgccgtatcatt

SEQ ID NO: 712 - protein, 116 aa, Homo sapiens
MLRLQMTDGHISCTAVEFSYMSKISLNTPPGTKVKLSGIVDIKNGFLLLNDSNTTVLGGEVEHLIEKWELQRSLSKHNRSNIGTEGGPPPFVPFGQFGRRNSQDKRKCEVLWCDPC

SEQ ID NO: 713 - protein, 651 aa, Homo sapiens
MLRLQMTDGHISCTAVEFSYMSKISLNTPPGTKVKLSGIVDIKNGFLLLNDSNTTVLGGEVEHLIEKWELQRSLSKHNRSNIGTEGGPPPFVPFGQKCVSHVQVDSRELDRRKTLQVTMPVKPTNDNDEFEKQRTAAIAEVAKSKETKTFGGGGGGARSNLNMNAAGNRNREVLQKEKSTKSEGKHEGVYRELVDEKALKHITEMGFSKEASRQALMDNGNNLEAALNVLLTSNKQKPVMGPPLRGRGKGRGRIRSEDEEDLGNARPSAPSTLFDFLESKMGTLNVEEPKSQPQQLHQGQYRSSNTEQNGVKDNNHLRHPPRNDTRQPRNEKPPRFQRDSQNSKSVLEGSGLPRNRGSERPSTSSVSEVWAEDRIKCDRPYSRYDRTKDTSYPLGSQHSDGAFKKRDNSMQSRSGKGPSFAEAKENPLPQGSVDYNNQKRGKRESQTSIPDYFYDRKSQTINNEAFSGIKIEKHFNVNTDYQNPVRSNSFIGVPNGEVEMPLKGRRIGPIKPAGPVTAVPCDDKIFYNSGPKRRSGPIKPEKILESSIPMEYAKMWKPGDECFALYWEDNKFYRAEVEALHSSGMTAVVKFIDYGNYEEVLLSNIKPIQTEAWEEEGTYDQTLEFRRGGDGQPRRSTRPTQQFYQPPRARN

SEQ ID NO: 714 - protein, 651 aa, Homo sapiens; identical to SEQ ID NO: 713

SEQ ID NO: 715 - protein, 129 aa, Homo sapiens
MLRLQMTDGHISCTAVEFSYMSKISLNTPPGTKVKLSGIVDIKNGFLLLNDSNTTVLGGEVEHLIEKWELQRSLSKHNRSNIGTEGGPPPFVPFGQKCVSHVQVDSRELDRRKTLQVTMPVKPTNDNDE

SEQ ID NO: 716 - protein, 744 aa, Homo sapiens
MAQVAGAALSQAGWYLSDEGIEACTSSPDKVNVNDIILIALNTDLRTIGKKFLPSDINSGKVEKLEGPCVLQIQKIRNVAAPKDNEESQAAPRMLRLQMTDGHISCTAVEFSYMSKISLNTPPGTKVKLSGIVDIKNGFLLLNDSNTTVLGGEVEHLIEKWELQRSLSKHNRSNIGTEGGPPPFVPFGQKCVSHVQVDSRELDRRKTLQVTMPVKPTNDNDEFEKQRTAAIAEVAKSKETKTFGGGGGGARSNLNMNAAGNRNREVLQKEKSTKSEGKHEGVYRELVDEKALKHITEMGFSKEASRQALMDNGNNLEAALNVLLTSNKQKPVMGPPLRGRGKGRGRIRSEDEEDLGNARPSAPSTLFDFLESKMGTLNVEEPKSQPQQLHQGQYRSSNTEQNGVKDNNHLRHPPRNDTRQPRNEKPPRFQRDSQNSKSVLEGSGLPRNRGSERPSTSSVSEVWAEDRIKCDRPYSRYDRTKDTSYPLGSQHSDGAFKKRDNSMQSRSGKGPSFAEAKENPLPQGSVDYNNQKRGKRESQTSIPDYFYDRKSQTINNEAFSGIKIEKHFNVNTDYQNPVRSNSFIGVPNGEVEMPLKGRRIGPIKPAGPVTAVPCDDKIFYNSGPKRRSGPIKPEKILESSIPMEYAKMWKPGDECFALYWEDNKFYRAEVEALHSSGMTAVVKFIDYGNYEEVLLSNIKPIQTEAWEEEGTYDQTLEFRRGGDGQPRRSTRPTQQFYQPPRARN

SEQ ID NO: 717 - protein, 651 aa, Homo sapiens; identical to SEQ ID NO: 713

SEQ ID NO: 718 - protein, 650 aa, Homo sapiens
MLRLQMTDGHISCTAVEFSYMSKISLNTPPGTKVKLSGIVDIKNGFLLLNDSNTTVLGGEVEHLIEKWELQRSLSKHNRSNIGTEGGPPPFVPFGQCVSHVQVDSRELDRRKTLQVTMPVKPTNDNDEFEKQRTAAIAEVAKSKETKTFGGGGGGARSNLNMNAAGNRNREVLQKEKSTKSEGKHEGVYRELVDEKALKHITEMGFSKEASRQALMDNGNNLEAALNVLLTSNKQKPVMGPPLRGRGKGRGRIRSEDEEDLGNARPSAPSTLFDFLESKMGTLNVEEPKSQPQQLHQGQYRSSNTEQNGVKDNNHLRHPPRNDTRQPRNEKPPRFQRDSQNSKSVLEGSGLPRNRGSERPSTSSVSEVWAEDRIKCDRPYSRYDRTKDTSYPLGSQHSDGAFKKRDNSMQSRSGKGPSFAEAKENPLPQGSVDYNNQKRGKRESQTSIPDYFYDRKSQTINNEAFSGIKIEKHFNVNTDYQNPVRSNSFIGVPNGEVEMPLKGRRIGPIKPAGPVTAVPCDDKIFYNSGPKRRSGPIKPEKILESSIPMEYAKMWKPGDECFALYWEDNKFYRAEVEALHSSGMTAVVKFIDYGNYEEVLLSNIKPIQTEAWEEEGTYDQTLEFRRGGDGQPRRSTRPTQQFYQPPRARN

SEQ ID NO: 719 - protein, 832 aa, Homo sapiens
MSEAGGAGPGGCGAGAGAGAGPGALPPQPAALPPAPPQGSPCAAAAGGSGACGPATAVAAAGTAEGPGGGGSARIAVKKAQLRSAPRAKKLEKLGVYSACKAEESCKCNGWKNPNPSPTPPRADLQQIIVSLTESCRSCSHALAAHVSHLENVSEEEMNRLLGIVLDVEYLFTCVHKEEDADTKQVYFYLFKLLRKSILQRGKPVVEGSLEKKPPFEKPSIEQGVNNFVQYKFSHLPAKERQTIVELAKMFLNRINYWHLEAPSQRRLRSPNDDISGYKENYTRWLCYCNVPQFCDSLPRYETTQVFGRTLLRSVFTVMRRQLLEQARQEKDKLPLEKRTLILTHFPKFLSMLEEEVYSQNSPIWDQDFLSASSRTSQLGIQTVINPPPVAGTISYNSTSSSLEQPNAGSSSPACKASSGLEANPGEKRKMTDSHVLEEAKKPRVMGDIPMELINEVMSTITDPAAMLGPETNFLSAHSARDEAARLEERRGVIEFHVVGNSLNQKPNKKILMWLVGLQNVFSHQLPRMPKEYITRLVFDPKHKTLALIKDGRVIGGICFRMFPSQGFTEIVFCAVTSNEQVKGYGTHLMNHLKEYHIKHDILNFLTYADEYAIGYFKKQGFSKEIKIPKTKYVGYIKDYEGATLMGCELNPRIPYTEFSVIIKKQKEIIKKLIERKQAQIRKVYPGLSCFKDGVRQIPIESIPGIRETGWKPSGKEKSKEPRDPDQLYSTLKSILQQVKSHQSAWPFMEPVKRTEAPGYYEVIRFPMDLKTMSERLKNRYYVSKKLFMADLQRVFTNCKEYNPPESEYYKCANILEKFFFSKIKEAGLIDK

SEQ ID NO: 720 - protein, 472 aa, Homo sapiens
MLGTVKMEGHETSDWNSYYADTQEAYSSVPVSNMNSGLGSMNSMNTYMTMNTMTTSGNMTPASFNMSYANPGLGAGLSPGAVAGMPGGSAGAMNSMTAAGVTAMGTALSPSGMGAMGAQQAASMNGLGPYAAAMNPCMSPMAYAPSNLGRSRAGGGGDAKTFKRSYPHAKPPYSYISLITMAIQQAPSKMLTLSEIYQWIMDLFPYYRQNQQRWQNSIRHSLSFNDCFVKVARSPDKPGKGSYWTLHPDSGNMFENGCYLRRQKRFKCEKQPGAGGGGGSGSGGSGAKGGPESRKDPSGASNPSADSPLHRGVHGKTGQLEGAPAPGPAASPQTLDHSGATATGGASELKTPASSTAPPISSGPGALASVPASHPAHGLAPHESQLHLKGDPHYSFNHPFSINNLMSSSEQQHKLDFKAYEQALQYSPYGSTLPASLPLGSASVTTRSPIEPSALEPAYYQGVYSRPVLNTS

SEQ ID NO: 721 - protein, 36 aa, Homo sapiens
MLGTVKMEGHETSDWNSYYADTQELAITLQKFNYHY

SEQ ID NO: 722 - protein, 531 aa, Homo sapiens
MVDVGKWPIFTLLSPQEIASIRKACVFGTSASEALYVTDNDEVFVFGLNYSNCLGTGDNQSTLVPKKLEGLCGKKIKSLSYGSGPHVLLSTEDGVVYAWGHNGYSQLGNGTTNQGIAPVQVCTNLLIKQVVEVACGSHHSMALAADGEVFAWGYNNCGQVGSGSTANQPTPRKVTNCLHIKRVVGIACGQTSSMAVLDNGEVYGWGYNGNGQLGLGNNGNQLTPVRVAALHSVCVNQIVCGYAHTLALTDEGLLYAWGANTYGQLGTGNKNNLLSPAHIMVEKERVVEIAACHSAHTSAAKTQGGHVYMWGQCRGQSVILPHLTHFSCTDDVFACFATPAVSWRLLSVEHEDFLTVAESLKKEFDSPETADLKFRIDGKYIHVHKAVLKIRCEHFRSMFQSYWNEDMKEVIEIDQFSYPVYRAFLQYLYTDTVDLPPEDAIGLLDLATSYCENRLKKLCQHIIKRGITVENAFSLFSAAVRYDAEDLEEFCFKFCINHLTEVTQTAAFWQMDGPLLKEFIAKASKCGAFKN

SEQ ID NO: 723 - protein, 531 aa, Homo sapiens; identical to SEQ ID NO: 722

SEQ ID NO: 724 - protein, 420 aa, Homo sapiens
MSGRPRTTSFAESCKPVQQPSAFGSMKVSRDKDGSKVTTVVATPGQGPDRPQEVSYTDTKVIGNGSFGVVYQAKLCDSGELVAIKKVLQDKRFKNRELQIMRKLDHCNIVRLRYFFYSSGEKKDEVYLNLVLDYVPETVYRVARHYSRAKQTLPVIYVKLYMYQLFRSLAYIHSFGICHRDIKPQNLLLDPDTAVLKLCDFGSAKQLVRGEPNVSYICSRYYRAPELIFGATDYTSSIDVWSAGCVLAELLLGQPIFPGDSGVDQLVEIIKVLGTPTREQIREMNPNYTEFKFPQIKAHPWTKVFRPRTPPEAIALCSRLLEYTPTARLTPLEACAHSFFDELRDPNVKLPNGRDTPALFNFTTQELSSNPPLATILIPPHARIQAAASTPTNATAASDANTGDRGQTNNAASASASNST

SEQ ID NO: 725 - protein, 433 aa, Homo sapiens
MSGRPRTTSFAESCKPVQQPSAFGSMKVSRDKDGSKVTTVVATPGQGPDRPQEVSYTDTKVIGNGSFGVVYQAKLCDSGELVAIKKVLQDKRFKNRELQIMRKLDHCNIVRLRYFFYSSGEKKDEVYLNLVLDYVPETVYRVARHYSRAKQTLPVIYVKLYMYQLFRSLAYIHSFGICHRDIKPQNLLLDPDTAVLKLCDFGSAKQLVRGEPNVSYICSRYYRAPELIFGATDYTSSIDVWSAGCVLAELLLGQPIFPGDSGVDQLVEIIKVLGTPTREQIREMNPNYTEFKFPQIKAHPWTKDSSGTGHFTSGVRVFRPRTPPEAIALCSRLLEYTPTARLTPLEACAHSFFDELRDPNVKLPNGRDTPALFNFTTQELSSNPPLATILIPPHARIQAAASTPTNATAASDANTGDRGQTNNAASASASNST

SEQ ID NO: 726 - protein, 326 aa, Homo sapiens
MEKDGLCRADQQYECVAEIGEGAYGKVFKARDLKNGGRFVALKRVRVQTGEEGMPLSTIREVAVLRHLETFEHPNVVRLFDVCTVSRTDRETKLTLVFEHVDQDLTTYLDKVPEPGVPTETIKDMMFQLLRGLDFLHSHRVVHRDLKPQNILVTSSGQIKLADFGLARIYSFQMALTSVVVTLWYRAPEVLLQSSYATPVDLWSVGCIFAEMFRRKPLFRGSSDVDQLGKILDVIGLPGEEDWPRDVALPRQAFHSKSAQPIEKFVTDIDELGKDLLLKCLTFNPAKRISAYSALSHPYFQDLERCKENLDSHLPPSQNTSELNTA

SEQ ID NO: 727 - protein, 326 aa, Homo sapiens; identical to SEQ ID NO: 726

SEQ ID NO: 728 - protein, 113 aa, Homo sapiens
MRSLGQNPTEAELQDMINEVDADGNGTIDFPEFLTMMARKMKDTDSEEEIREAFRVFDKDGNGYISAAELRHVMTNLGEKLTDEEVDEMIREADIDGDGQVNYEEFVQMMTAK

SEQ ID NO: 729 - protein, 149 aa, Homo sapiens [sequence omitted]

SEQ ID NO: 730 - protein, 83 aa, Homo sapiens
MADQLTEEQIAEFKEAFSLFDKDGDGTITTKELGTVMRSLGQNPTEAELQDMINEVDEMIREADIDGDGQVNYEEFVQMMTAK

SEQ ID NO: 731 - protein, 113 aa, Homo sapiens; identical to SEQ ID NO: 728

SEQ ID NO: 732 - protein, 113 aa, Homo sapiens; identical to SEQ ID NO: 728

SEQ ID NO: 733 - protein, 113 aa, Homo sapiens; identical to SEQ ID NO: 728

SEQ ID NO: 734 - protein, 149 aa, Homo sapiens [sequence omitted]

SEQ ID NO: 735 - protein, 474 aa, Homo sapiens
MVQQTNNAENTEALLAGESSDSGAGLELGIASSPTPGSTASTGGKADDPSWCKTPSGHIKRPMNAFMVWSQIERRKIMEQSPDMHNAEISKRLGKRWKLLKDSDKIPFIREAERLRLKHMADYPDYKYRPRKKVKSGNANSSSSAAASSKPGEKGDKVGGSGGGGHGGGGGGGSSNAGGGGGGASGGGANSKPAQKKSCGSKVAGGAGGGVSKPHAKLILAGGGGGGKAAAAAAASFAAEQAGAAALLPLGAAADHHSLYKARTPSASASASSAASASAALAAPGKHLAEKKVKRVYLFGGLGTSSSPVGGVGAGADPSDPLGLYEEEGAGCSPDAPSLSGRSSAASSPAAGRSPADHRGYASLRAASPAPSSAPSHASSSASSHSSSSSSSGSSSSDDEFEDDLLDLNPSSNFESMSLGSFSSSSALDRDLDFNFEPGSGSHFEFPDYCTPEVSEMISGDWLESSISNLVFTY

SEQ ID NO: 736 - protein, 680 aa, Homo sapiens
MKMKKFQIPVSFQDLTVNFTQEEWQQLDPAQRLLYRDVMLENYSNLVSVGYHVSKPDVIFKLEQGEEPWIVEEFSNQNYPDIDDALEKNKEIQDKHLTQTVFFSNKTLITERENVFGKTLNLGMNSVPSRKMPYKCNPGGNSLKTNSEVIVAKKSKENRKIPDGYSGFGKHEKSHLGMKKYRYNPMRKASNQNENLILHQNIQILKQPFDYNKCGKTFFKRAILITQKGRQTERKPNECNECRKTFSKRSTLIVHQRIHTGEKPYVCSDCRKTFRVKTSLTRHRRIHTGERPYECSECRKTFIDKSALIVHQKIHGGEKSYECNECGKTFFRKSALAEHFRSHTGEKPYECKECGNAFSKKSYLVVHQRTHRGEKPNECKECGKTFFCQSALTAHQRIHTGEKPYECSECEKTFFCQSALNVHRRSHTGEKPYECSQCGKFLCTKSALIAHQITHRGKKSYECNECGKFFCHKSTLTIHQRTHTGEKHGVFNKCGRISIVKSNCSQCKRMNTKENLYECSEHGHAVSKNSHLIVHQRTIWERPYECNECGRTYCRKSALTHHQRTHTGQRPYECNECGKTFCQKFSFVEHQRTHTGEKPYECNECGKSFCHKSAFRVHRRIHTGEKPYECNQCGKTYRRLWTLTEHQKIHTGEKPYECNKCEKTFRHKSNFLLHQKSHKE

SEQ ID NO: 737 - protein, 642 aa, Homo sapiens
MLENYSNLVSVGYHVSKPDVIFKLEQGEEPWIVEEFSNQNYPDIDDALEKNKEIQDKHLTQTVFFSNKTLITERENVFGKTLNLGMNSVPSRKMPYKCNPGGNSLKTNSEVIVAKKSKENRKIPDGYSGFGKHEKSHLGMKKYRYNPMRKASNQNENLILHQNIQILKQPFDYNKCGKTFFKRAILITQKGRQTERKPNECNECRKTFSKRSTLIVHQRIHTGEKPYVCSDCRKTFRVKTSLTRHRRIHTGERPYECSECRKTFIDKSALIVHQKIHGGEKSYECNECGKTFFRKSALAEHFRSHTGEKPYECKECGNAFSKKSYLVVHQRTHRGEKPNECKECGKTFFCQSALTAHQRIHTGEKPYECSECEKTFFCQSALNVHRRSHTGEKPYECSQCGKFLCTKSALIAHQITHRGKKSYECNECGKFFCHKSTLTIHQRTHTGEKHGVFNKCGRISIVKSNCSQCKRMNTKENLYECSEHGHAVSKNSHLIVHQRTIWERPYECNECGRTYCRKSALTHHQRTHTGQRPYECNECGKTFCQKFSFVEHQRTHTGEKPYECNECGKSFCHKSAFRVHRRIHTGEKPYECNQCGKTYRRLWTLTEHQKIHTGEKPYECNKCEKTFRHKSNFLLHQKSHKE

SEQ ID NO: 738 - protein, 703 aa, Homo sapiens
MCVFLHLLSYIKDTSFIPGPDCELHPRGMAATGPCSEAPVQGCDAGELQQLGLCGVSDVQRSWSKFCNFPLTGYHVSKPDVIFKLEQGEEPWIVEEFSNQNYPDIDDALEKNKEIQDKHLTQTVFFSNKTLITERENVFGKTLNLGMNSVPSRKMPYKCNPGGNSLKTNSEVIVAKKSKENRKIPDGYSGFGKHEKSHLGMKKYRYNPMRKASNQNENLILHQNIQILKQPFDYNKCGKTFFKRAILITQKGRQTERKPNECNECRKTFSKRSTLIVHQRIHTGEKPYVCSDCRKTFRVKTSLTRHRRIHTGERPYECSECRKTFIDKSALIVHQKIHGGEKSYECNECGKTFFRKSALAEHFRSHTGEKPYECKECGNAFSKKSYLVVHQRTHRGEKPNECKECGKTFFCQSALTAHQRIHTGEKPYECSECEKTFFCQSALNVHRRSHTGEKPYECSQCGKFLCTKSALIAHQITHRGKKSYECNECGKFFCHKSTLTIHQRTHTGEKHGVFNKCGRISIVKSNCSQCKRMNTKENLYECSEHGHAVSKNSHLIVHQRTIWERPYECNECGRTYCRKSALTHHQRTHTGQRPYECNECGKTFCQKFSFVEHQRTHTGEKPYECNECGKSFCHKSAFRVHRRIHTGEKPYECNQCGKTYRRLWTLTEHQKIHTGEKPYECNKCEKTFRHKSNFLLHQKSHKE

SEQ ID NO: 739 - protein, 679 aa, Homo sapiens
MENEKEIPVSFQDLTVNFTQEEWQQLDPAQRLLYRDVMLENYSNLVSVGYHVSKPDVIFKLEQGEEPWIVEEFSNQNYPDIDDALEKNKEIQDKHLTQTVFFSNKTLITERENVFGKTLNLGMNSVPSRKMPYKCNPGGNSLKTNSEVIVAKKSKENRKIPDGYSGFGKHEKSHLGMKKYRYNPMRKASNQNENLILHQNIQILKQPFDYNKCGKTFFKRAILITQKGRQTERKPNECNECRKTFSKRSTLIVHQRIHTGEKPYVCSDCRKTFRVKTSLTRHRRIHTGERPYECSECRKTFIDKSALIVHQKIHGGEKSYECNECGKTFFRKSALAEHFRSHTGEKPYECKECGNAFSKKSYLVVHQRTHRGEKPNECKECGKTFFCQSALTAHQRIHTGEKPYECSECEKTFFCQSALNVHRRSHTGEKPYECSQCGKFLCTKSALIAHQITHRGKKSYECNECGKFFCHKSTLTIHQRTHTGEKHGVFNKCGRISIVKSNCSQCKRMNTKENLYECSEHGHAVSKNSHLIVHQRTIWERPYECNECGRTYCRKSALTHHQRTHTGQRPYECNECGKTFCQKFSFVEHQRTHTGEKPYECNECGKSFCHKSAFRVHRRIHTGEKPYECNQCGKTYRRLWTLTEHQKIHTGEKPYECNKCEKTFRHKSNFLLHQKSHKE

SEQ ID NO: 740 - protein, 173 aa, Homo sapiens
MLENYSNLVSVGYHVSKPDVIFKLEQGEEPWIVEEFSNQNYPDIDDALEKNKEIQDKHLTQTVFFSNKTLITERENVFGKTLNLGMNSVPSRKMPYKCNPGGNSLKTNSEVIVAKKSKENRKIPDGYSGFGKHEKSHLGMKKYRYNPMRKASNQNENLILHQNIQILKQPFDY

SEQ ID NO: 741 - protein, 679 aa, Homo sapiens; identical to SEQ ID NO: 739

SEQ ID NO: 742 - protein, 1455 aa, Homo sapiens
MGGACSSFTTSSSPTIYSTSVTDSKAMQVESCSSAVGVSNRGVSEKQLTSNTVQQHPSTPKRHTVLYISPPPEDLLDNSRMSCQDEGCGLESEQSCSMWMEDSPSNFSNMSTSSYNDNTEVPRKSRKRNPKQRPGVKRRDCEESNMDIFDADSAKAPHYVLSQLTTDNKGNSKAGNGTLENQKGTGVKKSPMLCGQYPVKSEGKELKIVVQPETQHRARYLTEGSRGSVKDRTQQGFPTVKLEGHNEPVVLQVFVGNDSGRVKPHGFYQACRVTGRNTTPCKEVDIEGTTVIEVGLDPSNNMTLAVDCVGILKLRNADVEARIGIAGSKKKSTRARLVFRVNIMRKDGSTLTLQTPSSPILCTQPAGVPEILKKSLHSCSVKGEEEVFLIGKNFLKGTKVIFQENVSDENSWKSEAEIDMELFHQNHLIVKVPPYHDQHITLPVSVGIYVVTNAGRSHDVQPFTYTPDPAAAGALNVNVKKEISSPARPCSFEEAMKAMKTTGCNLDKVNIIPNALMTPLIPSSMIKSEDVTPMEVTAEKRSSTIFKTTKSVGSTQQTLENISNIAGNGSFSSPSSSHLPSENEKQQQIQPKAYNPETLTTIQTQDISQPGTFPAVSASSQLPNSDALLQQATQFQTRETQSREILQSDGTVVNLSQLTEASQQQQQSPLQEQAQTLQQQISSNIFPSPNSVSQLQNTIQQLQAGSFTGSTASGSSGSVDLVQQVLEAQQQLSSVLFSAPDGNENVQEQLSADIFQQVSQIQSGVSPGMFSSTEPTVHTRPDNLLPGRAESVHPQSENTLSNQQQQQQQQQQVMESSAAMVMEMQQSICQAAAQIQSELFPSTASANGNLQQSPVYQQTSHMMSALSTNEDMQMQCELFSSPPAVSGNETSTTTTQQVATPGTTMFQTSSSGDGEETGTQAKQIQNSVFQTMVQMQHSGDNQPQVNLFSSTKSMMSVQNSGTQQQGNGLFQQGNEMMSLQSGNFLQQSSHSQAQLFHPQNPIADAQNLSQETQGSLFHSPNPIVHSQTSTTSSEQMQPPMFHSQSTIAVLQGSSVPQDQQSTNIFLSQSPMNNLQTNTVAQEAFFAAPNSISPLQSTSNSEQQAAFQQQAPISHIQTPMLSQEQAQPPQQGLFQPQVALGSLPPNPMPQSQQGTMFQSQHSIVAMQSNSPSQEQQQQQQQQQQQQQQQQQSILFSNQNTMATMASPKQPPPNMIFNPNQNPMANQEQQNQSIFHQQSNMAPMNQEQQPMQFQSQSTVSSLQNPGPTQSESSQTPLFHSSPQIQLVQGSPSSQEQQVTLFLSPASMSALQTSINQQDMQQSPLYSPQNNMPGIQGATSSPQPQATLFHNTAGGTMNQLQNSPGSSQQTSGMFLFGIQNNCSQLLTSGPATLPDQLMAISQPGQPQNEGQPPVTTLLSQQMPENSPLASSINTNQNIEKIDLLVSLQNQGNNLTGSF

SEQ ID NO: 743 - protein, 70 aa, Homo sapiens
  misc_feature (1)..(1): Xaa can be any naturally occurring amino acid
XIIPTLPSDKLSKIQTLKLAARYIDFLYQVLQSDELDSKMASCSYVAHERLSYAFSVWRMEGAWSMSASH

SEQ ID NO: 744 - protein, 135 aa, Homo sapiens
  misc_feature (1)..(1): Xaa can be any naturally occurring amino acid
XPAQGKRGKKSAGCGGGGGAGGGGGSSSGGGSPQSYEELQTQRVMANVRERQRTQSLNEAFAALRKIIPTLPSDKLSKIQTLKLAARYIDFLYQVLQSDELDSKMASCSYVAHERLSYAFSVWRMEGAWSMSASH

SEQ ID NO: 745 - protein, 202 aa, Homo sapiens
MMQDVSSSPVSPADDSLSNSEEEPDRQQPPSGKRGGRKRRSSRRSAGGGAGPGGAAGGGVGGGDEPGSPAQGKRGKKSAGCGGGGGAGGGGGSSSGGGSPQSYEELQTQRVMANVRERQRTQSLNEAFAALRKIIPTLPSDKLSKIQTLKLAARYIDFLYQVLQSDELDSKMASCSYVAHERLSYAFSVWRMEGAWSMSASH

SEQ ID NO: 746 - protein, 636 aa, Homo sapiens
MAQSTATSPDGGTTFEHLWSSLEPDSTYFDLPQSSRGNNEVVGGTDSSMDVFHLEGMTTSVMAQFNLLSSTMDQMSSRAASASPYTPEHAASVPTHSPYAQPSSTFDTMSPAPVIPSNTDYPGPHHFEVTFQQSSTAKSATWTYSPLLKKLYCQIAKTCPIQIKVSTPPPPGTAIRAMPVYKKAEHVTDVVKRCPNHELGRDFNEGQSAPASHLIRVEGNNLSQYVDDPVTGRQSVVVPYEPPQVGTEFTTILYNFMCNSSCVGGMNRRPILIIITLEMRDGQVLGRRSFEGRICACPGRDRKADEDHYREQQALNESSAKNGAASKRAFKQSPPAVPALGAGVKKRRHGDEDTYYLQVRGRENFEILMKLKESLELMELVPQPLVDSYRQQQQLLQRPSHLQPPSYGPVLSPMNKVHGGMNKLPSVNQLVGQPPPHSSAATPNLGPVGPGMLNNHGHAVPANGEMSSSHSAQSMVSGSHCTPPPPYHADPSLVSFLTGLGCPNCIEYFTSQGLQSIYHLQNLTIEDLGALKIPEQYRMTIWRGLQDLKQGHDYSTAQQLLRSSNAATISIGGSGELQRQRVMEAVHFRVRHTITIPNRGGPGGGPDEWADFGFDLPDCKARKQPIKEEFTEAEIH

SEQ ID NO: 747 - protein, 403 aa, Homo sapiens
MAQSTATSPDGGTTFEHLWSSLEPDSTYFDLPQSSRGNNEVVGGTDSSMDVFHLEGMTTSVMAQFNLLSSTMDQMSSRAASASPYTPEHAASVPTHSPYAQPSSTFDTMSPAPVIPSNTDYPGPHHFEVTFQQSSTAKSATWTYSPLLKKLYCQIAKTCPIQIKVSTPPPPGTAIRAMPVYKKAEHVTDVVKRCPNHELGRDFNEGQSAPASHLIRVEGNNLSQYVDDPVTGRQSVVVPYEPPQVGTEFTTILYNFMCNSSCVGGMNRRPILIIITLEMRDGQVLGRRSFEGRICACPGRDRKADEDHYREQQALNESSAKNGAASKRAFKQSPPAVPALGAGVKKRRHGDEDTYYLQVRGRENFEILMKLKESLELMELVPQPLVDSYRQQQQLLQRPTWGP

SEQ ID NO: 748 - protein, 499 aa, Homo sapiens
MAQSTATSPDGGTTFEHLWSSLEPDSTYFDLPQSSRGNNEVVGGTDSSMDVFHLEGMTTSVMAQFNLLSSTMDQMSSRAASASPYTPEHAASVPTHSPYAQPSSTFDTMSPAPVIPSNTDYPGPHHFEVTFQQSSTAKSATWTYSPLLKKLYCQIAKTCPIQIKVSTPPPPGTAIRAMPVYKKAEHVTDVVKRCPNHELGRDFNEGQSAPASHLIRVEGNNLSQYVDDPVTGRQSVVVPYEPPQVGTEFTTILYNFMCNSSCVGGMNRRPILIIITLEMRDGQVLGRRSFEGRICACPGRDRKADEDHYREQQALNESSAKNGAASKRAFKQSPPAVPALGAGVKKRRHGDEDTYYLQVRGRENFEILMKLKESLELMELVPQPLVDSYRQQQQLLQRPSHLQPPSYGPVLSPMNKVHGGMNKLPSVNQLVGQPPPHSSAATPNLGPVGPGMLNNHGHAVPANGEMSSSHSAQSMVSGSHCTPPPPYHADPSLVRTWGP

SEQ ID NO: 749 - protein, 555 aa, Homo sapiens
MAQSTATSPDGGTTFEHLWSSLEPDSTYFDLPQSSRGNNEVVGGTDSSMDVFHLEGMTTSVMAQFNLLSSTMDQMSSRAASASPYTPEHAASVPTHSPYAQPSSTFDTMSPAPVIPSNTDYPGPHHFEVTFQQSSTAKSATWTYSPLLKKLYCQIAKTCPIQIKVSTPPPPGTAIRAMPVYKKAEHVTDVVKRCPNHELGRDFNEGQSAPASHLIRVEGNNLSQYVDDPVTGRQSVVVPYEPPQVGTEFTTILYNFMCNSSCVGGMNRRPILIIITLEMRDGQVLGRRSFEGRICACPGRDRKADEDHYREQQALNESSAKNGAASKRAFKQSPPAVPALGAGVKKRRHGDEDTYYLQVRGRENFEILMKLKESLELMELVPQPLVDSYRQQQQLLQRPPRDAQQPWPRSASQRRDEQQPQRPVHGLGVPLHSATPLPRRPQPRQDLGALKIPEQYRMTIWRGLQDLKQGHDYSTAQQLLRSSNAATISIGGSGELQRQRVMEAVHFRVRHTITIPNRGGPGGGPDEWADFGFDLPDCKARKQPIKEEFTEAEIH

SEQ ID NO: 750 - protein, 540 aa, Homo sapiens
MAQSTATSPDGGTTFEHLWSSLEPDSTYFDLPQSSRGNNEVVGGTDSSMDVFHLEGMTTSVMAQFNLLSSTMDQMSSRAASASPYTPEHAASVPTHSPYAQPSSTFDTMSPAPVIPSNTDYPGPHHFEVTFQQSSTAKSATWTYSPLLKKLYCQIAKTCPIQIKVSTPPPPGTAIRAMPVYKKAEHVTDVVKRCPNHELGRDFNEGQSAPASHLIRVEGNNLSQYVDDPVTGRQSVVVPYEPPQVGTEFTTILYNFMCNSSCVGGMNRRPILIIITLEMRDGQVLGRRSFEGRICACPGRDRKADEDHYREQQALNESSAKNGAASKRAFKQSPPAVPALGAGVKKRRHGDEDTYYLQVRGRENFEILMKLKESLELMELVPQPLVDSYRQQQQLLQRPFLTGLGCPNCIEYFTSQGLQSIYHLQNLTIEDLGALKIPEQYRMTIWRGLQDLKQGHDYSTAQQLLRSSNAATISIGGSGELQRQRVMEAVHFRVRHTITIPNRGGPGGGPDEWADFGFDLPDCKARKQPIKEEFTEAEIH

SEQ ID NO: 751 - protein, 450 aa, Homo sapiens
MLYVGDPARHLATAQFNLLSSTMDQMSSRAASASPYTPEHAASVPTHSPYAQPSSTFDTMSPAPVIPSNTDYPGPHHFEVTFQQSSTAKSATWTYSPLLKKLYCQIAKTCPIQIKVSTPPPPGTAIRAMPVYKKAEHVTDVVKRCPNHELGRDFNEGQSAPASHLIRVEGNNLSQYVDDPVTGRQSVVVPYEPPQVGTEFTTILYNFMCNSSCVGGMNRRPILIIITLEMRDGQVLGRRSFEGRICACPGRDRKADEDHYREQQALNESSAKNGAASKRAFKQSPPAVPALGAGVKKRRHGDEDTYYLQVRGRENFEILMKLKESLELMELVPQPLVDSYRQQQQLLQRPSHLQPPSYGPVLSPMNKVHGGMNKLPSVNQLVGQPPPHSSAATPNLGPVGPGMLNNHGHAVPANGEMSSSHSAQSMVSGSHCTPPPPYHADPSLVRTWGP

SEQ ID NO: 752 - protein, 426 aa, Homo sapiens
MLYVGDPARHLATAQFNLLSSTMDQMSSRAASASPYTPEHAASVPTHSPYAQPSSTFDTMSPAPVIPSNTDYPGPHHFEVTFQQSSTAKSATWTYSPLLKKLYCQIAKTCPIQIKVSTPPPPGTAIRAMPVYKKAEHVTDVVKRCPNHELGRDFNEGQSAPASHLIRVEGNNLSQYVDDPVTGRQSVVVPYEPPQVGTEFTTILYNFMCNSSCVGGMNRRPILIIITLEMRDGQVLGRRSFEGRICACPGRDRKADEDHYREQQALNESSAKNGAASKRAFKQSPPAVPALGAGVKKRRHGDEDTYYLQVRGRENFEILMKLKESLELMELVPQPLVDSYRQQQQLLQRPPRDAQQPWPRSASQRRDEQQPQRPVHGLGVPLHSATPLPRRPQPRQFFNRIGVSKLHRVFHLPRVTEHLPPAEPDH

SEQ ID NO: 753 - protein, 587 aa, Homo sapiens
MLYVGDPARHLATAQFNLLSSTMDQMSSRAASASPYTPEHAASVPTHSPYAQPSSTFDTMSPAPVIPSNTDYPGPHHFEVTFQQSSTAKSATWTYSPLLKKLYCQIAKTCPIQIKVSTPPPPGTAIRAMPVYKKAEHVTDVVKRCPNHELGRDFNEGQSAPASHLIRVEGNNLSQYVDDPVTGRQSVVVPYEPPQVGTEFTTILYNFMCNSSCVGGMNRRPILIIITLEMRDGQVLGRRSFEGRICACPGRDRKADEDHYREQQALNESSAKNGAASKRAFKQSPPAVPALGAGVKKRRHGDEDTYYLQVRGRENFEILMKLKESLELMELVPQPLVDSYRQQQQLLQRPSHLQPPSYGPVLSPMNKVHGGMNKLPSVNQLVGQPPPHSSAATPNLGPVGPGMLNNHGHAVPANGEMSSSHSAQSMVSGSHCTPPPPYHADPSLVSFLTGLGCPNCIEYFTSQGLQSIYHLQNLTIEDLGALKIPEQYRMTIWRGLQDLKQGHDYSTAQQLLRSSNAATISIGGSGELQRQRVMEAVHFRVRHTITIPNRGGPGGGPDEWADFGFDLPDCKARKQPIKEEFTEAEIH

SEQ ID NO: 754 - protein, 565 aa, Homo sapiens
MDQMSSRAASASPYTPEHAASVPTHSPYAQPSSTFDTMSPAPVIPSNTDYPGPHHFEVTFQQSSTAKSATWTYSPLLKKLYCQIAKTCPIQIKVSTPPPPGTAIRAMPVYKKAEHVTDVVKRCPNHELGRDFNEGQSAPASHLIRVEGNNLSQYVDDPVTGRQSVVVPYEPPQVGTEFTTILYNFMCNSSCVGGMNRRPILIIITLEMRDGQVLGRRSFEGRICACPGRDRKADEDHYREQQALNESSAKNGAASKRAFKQSPPAVPALGAGVKKRRHGDEDTYYLQVRGRENFEILMKLKESLELMELVPQPLVDSYRQQQQLLQRPSHLQPPSYGPVLSPMNKVHGGMNKLPSVNQLVGQPPPHSSAATPNLGPVGPGMLNNHGHAVPANGEMSSSHSAQSMVSGSHCTPPPPYHADPSLVSFLTGLGCPNCIEYFTSQGLQSIYHLQNLTIEDLGALKIPEQYRMTIWRGLQDLKQGHDYSTAQQLLRSSNAATISIGGSGELQRQRVMEAVHFRVRHTITIPNRGGPGGGPDEWADFGFDLPDCKARKQPIKEEFTEAEIH

SEQ ID NO: 755 - protein, 555 aa, Homo sapiens; identical to SEQ ID NO: 749

SEQ ID NO: 756 - protein, 540 aa, Homo sapiens; identical to SEQ ID NO: 750

SEQ ID NO: 757 - protein, 602 aa, Homo sapiens
MAAEEEAAAGGKVLREENQCIAPVVSSRVSPGTRPTAMGSFSSHMTEFPRKRKGSDSDPSQVEDGEHQVKMKAFREAHSQTEKRRRDKMNNLIEELSAMIPQCNPMARKLDKLTVLRMAVQHLRSLKGLTNSYVGSNYRPSFLQDNELRHLILKTAEGFLFVVGCERGKILFVSKSVSKILNYDQASLTGQSLFDFLHPKDVAKVKEQLSSFDISPREKLIDAKTGLQVHSNLHAGRTRVYSGSRRSFFCRIKSCKISVKEEHGCLPNSKKKEHRKFYTIHCTGYLRSWPPNIVGMEEERNSKKDNSNFTCLVAIGRLQPYIVPQNSGEINVKPTEFITRFAVNGKFVYVDQRATAILGYLPQELLGTSCYEYFHQDDHNNLTDKHKAVLQSKEKILTDSYKFRAKDGSFVTLKSQWFSFTNPWTKELEYIVSVNTLVLGHSEPGEASFLPCSSQSSEESSRQSCMSVPGMSTGTVLGAGSIGTDIANEILDLQRLQSSSYLDDSSPTGLMKDTHTVNCRSMSNKELFPPSPSEMGELEATRQNQSTVAVHSHEPLLSDGAQLDFDALCDNDDTAMAAFMNYLEAEGGLGDPGDFSDIQWTL

SEQ ID NO: 758 - protein, 599 aa, Homo sapiens
MAAEEEAAAGGEVAGGEATAPGKVLREENQCIAPVVSSRVSPGTRPTAMGSFSSHMTEFPRKRKGSDSDPSQEAHSQTEKRRRDKMNNLIEELSAMIPQCNPMARKLDKLTVLRMAVQHLRSLKGLTNSYVGSNYRPSFLQDNELRHLILKTAEGFLFVVGCERGKILFVSKSVSKILNYDQASLTGQSLFDFLHPKDVAKVKEQLSSFDISPREKLIDAKTGLQVHSNLHAGRTRVYSGSRRSFFCRIKSCKISVKEEHGCLPNSKKKEHRKFYTIHCTGYLRSWPPNIVGMEEERNSKKDNSNFTCLVAIGRLQPYIVPQNSGEINVKPTEFITRFAVNGKFVYVDQRATAILGYLPQELLGTSCYEYFHQDDHNNLTDKHKAVLQSKEKILTDSYKFRAKDGSFVTLKSQWFSFTNPWTKELEYIVSVNTLVLGHSEPGEASFLPCSSQSSEESSRQSCMSVPGMSTGTVLGAGSIGTDIANEILDLQRLQSSSYLDDSSPTGLMKDTHTVNCRSMSNKELFPPSPSEMGELEATRQNQSTVAVHSHEPLLSDGAQLDFDALCDNDDTAMAAFMNYLEAEGGLGDPGDFSDIQWTL

SEQ ID NO: 759 - protein, 540 aa, Homo sapiens
MAAEEEAAAGGEVAGGEATAPGKVLREENQCIAPVVSSRVSPGTRPTAMGSFSSHMTEFPRKRKGSDSDPSQEAHSQTEKRRRDKMNNLIEELSAMIPQCNPMARKLDKLTVLRMAVQHLRSLKGLTNSYVGSNYRPSFLQDNELRHLILKTAEGFLFVVGCERGKILFVSKSVSKILNYDQASLTGQSLFDFLHPKDVAKVKEQLSSFDISPREKLIDAKTGLQVHSNLHAGRTRVYSGSRRSFFCRIKSCKISVKEEHGCLPNSKKKEHRKFYTIHCTGYLRSWPPNIVGMEEERNSKKDNSNFTCLVAIGRLQPYIVPQNSGEINVKPTEFITRFAVNGKFVYVDQRATAILGYLPQELLGTSCYEYFHQDDHNNLTDKHKAVLQSKEKILTDSYKFRAKDGSFVTLKSQWFSFTNPWTKELEYIVSVNTLVLGHSEPGEASFLPCSSQSSEESSRQSCMSVPGMSTGTVLGAGSIGTDIANEILDLQRLQSSSYLDDSSPTGLMKDTHTVNCRSVMVHSWISMPYVTMMTQPWLHL

SEQ ID NO: 760 - protein, 622 aa, Homo sapiens
MAAEEEAAAGGKVLREENQCIAPVVSSRVSPGTRPTAMGSFSSHMTEFPRKRKGSDSDPSQSGIMTEKVVEKLSQNPLTYLLSTRIEISASSGSREAHSQTEKRRRDKMNNLIEELSAMIPQCNPMARKLDKLTVLRMAVQHLRSLKGLTNSYVGSNYRPSFLQDNELRHLILKTAEGFLFVVGCERGKILFVSKSVSKILNYDQASLTGQSLFDFLHPKDVAKVKEQLSSFDISPREKLIDAKTGLQVHSNLHAGRTRVYSGSRRSFFCRIKSCKISVKEEHGCLPNSKKKEHRKFYTIHCTGYLRSWPPNIVGMEEERNSKKDNSNFTCLVAIGRLQPYIVPQNSGEINVKPTEFITRFAVNGKFVYVDQRATAILGYLPQELLGTSCYEYFHQDDHNNLTDKHKAVLQSKEKILTDSYKFRAKDGSFVTLKSQWFSFTNPWTKELEYIVSVNTLVLGHSEPGEASFLPCSSQSSEESSRQSCMSVPGMSTGTVLGAGSIGTDIANEILDLQRLQSSSYLDDSSPTGLMKDTHTVNCRSMSNKELFPPSPSEMGELEATRQNQSTVAVHSHEPLLSDGAQLDFDALCDNDDTAMAAFMNYLEAEGGLGDPGDFSDIQWTL

SEQ ID NO: 761 - protein, 588 aa, Homo sapiens
MAAEEEAAAGGKVLREENQCIAPVVSSRVSPGTRPTAMGSFSSHMTEFPRKRKGSDSDPSQEAHSQTEKRRRDKMNNLIEELSAMIPQCNPMARKLDKLTVLRMAVQHLRSLKGLTNSYVGSNYRPSFLQDNELRHLILKTAEGFLFVVGCERGKILFVSKSVSKILNYDQASLTGQSLFDFLHPKDVAKVKEQLSSFDISPREKLIDAKTGLQVHSNLHAGRTRVYSGSRRSFFCRIKSCKISVKEEHGCLPNSKKKEHRKFYTIHCTGYLRSWPPNIVGMEEERNSKKDNSNFTCLVAIGRLQPYIVPQNSGEINVKPTEFITRFAVNGKFVYVDQRATAILGYLPQELLGTSCYEYFHQDDHNNLTDKHKAVLQSKEKILTDSYKFRAKDGSFVTLKSQWFSFTNPWTKELEYIVSVNTLVLGHSEPGEASFLPCSSQSSEESSRQSCMSVPGMSTGTVLGAGSIGTDIANEILDLQRLQSSSYLDDSSPTGLMKDTHTVNCRSMSNKELFPPSPSEMGELEATRQNQSTVAVHSHEPLLSDGAQLDFDALCDNDDTAMAAFMNYLEAEGGLGDPGDFSDIQWTL

SEQ ID NO: 762 - protein, 636 aa, Homo sapiens
MAAEEEAAAGGKVLREENQCIAPVVSSRVSPGTRPTAMGSFSSHMTEFPRKRKGSDSDPSQSGIMTEKVVEKLSQNPLTYLLSTRIEISASSGSRVEDGEHQVKMKAFREAHSQTEKRRRDKMNNLIEELSAMIPQCNPMARKLDKLTVLRMAVQHLRSLKGLTNSYVGSNYRPSFLQDNELRHLILKTAEGFLFVVGCERGKILFVSKSVSKILNYDQASLTGQSLFDFLHPKDVAKVKEQLSSFDISPREKLIDAKTGLQVHSNLHAGRTRVYSGSRRSFFCRIKSCKISVKEEHGCLPNSKKKEHRKFYTIHCTGYLRSWPPNIVGMEEERNSKKDNSNFTCLVAIGRLQPYIVPQNSGEINVKPTEFITRFAVNGKFVYVDQRATAILGYLPQELLGTSCYEYFHQDDHNNLTDKHKAVLQSKEKILTDSYKFRAKDGSFVTLKSQWFSFTNPWTKELEYIVSVNTLVLGHSEPGEASFLPCSSQSSEESSRQSCMSVPGMSTGTVLGAGSIGTDIANEILDLQRLQSSSYLDDSSPTGLMKDTHTVNCRSMSNKELFPPSPSEMGELEATRQNQSTVAVHSHEPLLSDGAQLDFDALCDNDDTAMAAFMNYLEAEGGLGDPGDFSDIQWTL

SEQ ID NO: 763 - protein, 588 aa, Homo sapiens
  misc_feature (1)..(1): Xaa can be any naturally occurring amino acid
XPVVSSRVSPGTRPTAMGSFSSHMTEFPRKRKGSDSDPSHQNPLTYLLSTRIEISASSGSREAHSQTEKRRRDKMNNLIEELSAMIPQCNPMARKLDKLTVLRMAVQHLRSLKGLTNSYVGSNYRPSFLQDNELRHLILKTAEGFLFVVGCERGKILFVSKSVSKILNYDQASLTGQSLFDFLHPKDVAKVKEQLSSFDISPREKLIDAKTGLQVHSNLHAGRTRVYSGSRRSFFCRIKSCKISVKEEHGCLPNSKKKEHRKFYTIHCTGYLRSWPPNIVGMEEERNSKKDNSNFTCLVAIGRLQPYIVPQNSGEINVKPTEFITRFAVNGKFVYVDQRATAILGYLPQELLGTSCYEYFHQDDHNNLTDKHKAVLQSKEKILTDSYKFRAKDGSFVTLKSQWFSFTNPWTKELEYIVSVNTLVLGHSEPGEASFLPCSSQSSEESSRQSCMSVPGMSTGTVLGAGSIGTDIANEILDLQRLQSSSYLDDSSPTGLMKDTHTVNCRSMSNKELFPPSPSEMGELEATRQNQSTVAVHSHEPLLSDGAQLDFDALCDNDDTAMAAFMNYLEAEGGLGDPGDFSDIQWTL

SEQ ID NO: 764 - protein, 551 aa, Homo sapiens
MGSFSSHMTEFPRKRKGSDSDPSQEAHSQTEKRRRDKMNNLIEELSAMIPQCNPMARKLDKLTVLRMAVQHLRSLKGLTNSYVGSNYRPSFLQDNELRHLILKTAEGFLFVVGCERGKILFVSKSVSKILNYDQASLTGQSLFDFLHPKDVAKVKEQLSSFDISPREKLIDAKTGLQVHSNLHAGRTRVYSGSRRSFFCRIKSCKISVKEEHGCLPNSKKKEHRKFYTIHCTGYLRSWPPNIVGMEEERNSKKDNSNFTCLVAIGRLQPYIVPQNSGEINVKPTEFITRFAVNGKFVYVDQRATAILGYLPQELLGTSCYEYFHQDDHNNLTDKHKAVLQSKEKILTDSYKFRAKDGSFVTLKSQWFSFTNPWTKELEYIVSVNTLVLGHSEPGEASFLPCSSQSSEESSRQSCMSVPGMSTGTVLGAGSIGTDIANEILDLQRLQSSSYLDDSSPTGLMKDTHTVNCRSMSNKELFPPSPSEMGELEATRQNQSTVAVHSHEPLLSDGAQLDFDALCDNDDTAMAAFMNYLEAEGGLGDPGDFSDIQWTL

SEQ ID NO: 765 - protein, 125 aa, Homo sapiens
MPHSSDSSDSSFSRSPPPGKQDSSDDVRRVQRREKNRIAAQKSRQRQTQKADTLHLESEDLEKQNAALRKEIKQLTEELKYFTSVLNSHEPLCSVLAASTPSPPEVVYSAHAFHQPHVSSPRFQP

SEQ ID NO: 766 - protein, 73 aa, Homo sapiens
MPHSSDSSDSSFSRSPPPGKQDSSDDVRRVQRREKNRIAAQKSRQRQTQKSIKKDAQVPWHRARRAGNGYFSK

SEQ ID NO: 767 - protein, 202 aa, Homo sapiens
MATLIYVDKENGEPGTRVVAKDGLKLGSGPSIKALDGRSQVSTPRFGKTFDAPPALPKATRKALGTVNRATEKSVKTKGPLKQKQPSFSAKKMTEKTVKAKSSVPASDDAYPEIEKFFPFNPLDFESFDLPEEHQIAHLPLSGVPLMILDEERELEKLFQLGPPSPVKMPSPPWESNLLQSPSSILSTLDVELPPVCCDIDI

SEQ ID NO: 768 - protein, 121 aa, Homo sapiens
MPLPKVGGGFGGERSSLYTQYLSCTGILLLEYSYGKTFSSAIKALDGRSQVSTPRFGKTFDAPPALPKATRKALGTVNRATEKSVKTKGPLKQKQPSFSAKKMTEKTVKAKSSVPASDDAY

SEQ ID NO: 769 - protein, 202 aa, Homo sapiens; identical to SEQ ID NO: 767

SEQ ID NO: 770 - protein, 202 aa, Homo sapiens; identical to SEQ ID NO: 767

SEQ ID NO: 771 - protein, 2406 aa, Homo sapiens
MDPEQSVKGTKKAEGSPRKRLTKGEAIQTSVSSSVPYPGSGTAATQESPAQELLAPQPFPGPSSVLREGSQEKTGQQQKPPKRPPIEASVHISQLPQHPLTPAFMSPGKPEHLLEGSTWQLVDPMRPGPSGSFVAPGLHPQSQLLPSHASIIPPEDLPGVPKVFVPRPSQVSLKPTEEAHKKERKPQKPGKYICQYCSRPCAKPSVLQKHIRSHTGERPYPCGPCGFSFKTKSNLYKHRKSHAHRIKAGLASGMGGEMYPHGLEMERIPGEEFEEPTEGESTDSEEETSATSGHPAELSPRPKQPLLSSGLYSSGSHSSSHERCSLSQSSTAQSLEDPPPFVEPSSEHPLSHKPEDTHTIKQKLALRLSERKKVIDEQAFLSPGSKGSTESGYFSRSESAEQQVSPPNTNAKSYAEIIFGKCGRIGQRTAMLTATSTQPLLPLSTEDKPSLVPLSVPRTQVIEHITKLITINEAVVDTSEIDSVKPRRSSLSRRSSMESPKSSLYREPLSSHSEKTKPEQSLLSLQHPPSTAPPVPLLRSHSMPSAACTISTPHHPFRGSYSFDDHITDSEALSHSSHVFTSHPRMLKRQPAIELPLGGEYSSEEPGPSSKDTASKPSDEVEPKESELTKKTKKGLKTKGVIYECNICGARYKKRDNYEAHKKYYCSELQIAKPISAGTHTSPEAEKSQIEHEPWSQMMHYKLGTTLELTPLRKRRKEKSLGDEEEPPAFESTKSQFGSPGPSDAARNLPLESTKSPAEPSKSVPSLEGPTGFQPRTPKPGSGSESGKERRTTSKEISVIQHTSSFEKSDSLEQPSGLEGEDKPLAQFPSPPPAPHGRSAHSLQPKLVRQPNIQVPEILVTEEPDRPDTEPEPPPKEPEKTEEFQWPQRSQTLAQLPAEKLPPKKKRLRLAEMAQSSGESSFESSVPLSRSPSQESNVSLSGSSRSASFERDDHGKAEAPSPSSDMRPKPLGTHMLTVPSHHPHAREMRRSASEQSPNVSHSAHMTETRSKSFDYGSLSLTGPSAPAPVAPPARVAPPERRKCFLVRQASLSRPPESELEVAPKGRQESEEPQPSSSKPSAKSSLSQISSAATSHGGPPGGKGPGQDRPPLGPTVPYTEALQVFHHPVAQTPLHEKPYLPPPVSLFSFQHLVQHEPGQSPEFFSTQAMSSLLSSPYSMPPLPPSLFQAPPLPLQPTVLHPGQLHLPQLMPHPANIPFRQPPSFLPMPYPTSSALSSGFFLPLQSQFALQLPGDVESHLPQIKTSLAPLATGSAGLSPSTEYSSDIRLPPVAPPASSSAPTSAPPLALPACPDTMVSLVVPVRVQTNMPSYGSAMYTTLSQILVTQSQGSSATVALPKFEEPPSKGTTVCGADVHEVGPGPSGLSEEQSRAFPTPYLRVPVTLPERKGTSLSSESILSLEGSSSTAGGSKRVLSPAGSLELTMETQQQKRVKEEEASKADEKLELVKPCSVVLTSTEDGKRPEKSHLGNQGQGRRELEMLSSLSSDPSDTKEIPPLPHPALSHGTAPGSEALKEYPQPSGKPHRRGLTPLSVKKEDSKEQPDLPSLAPPSSLPLSETSSRPAKSQEGTDSKKVLQFPSLHTTTNVSWCYLNYIKPNHIQHADRRSSVYAGWCISLYNPNLPGVSTKAALSLLRSKQKVSKETYTMATAPHPEAGRLVPSSSRKPRMTEVHLPSLVSPEGQKDLARVEKEEERRGEPEEDAPASQRGEPARIKIFEGGYKSNEEYVYVRGRGRGKYVCEECGIRCKKPSMLKKHIRTHTDVRPYVCKHCHFAFKTKGNLTKHMKSKAHSKKCQETGVLEELEAEEGTSDDLFQDSEGREGSEAVEEHQFSDLEDSDSDSDLDEDEDEDEEESQDELSRPSSEAPPPGPPHALRADSSPILGPQPPDAPASGTEATRGSSVSEAERLTASSCSMSSQSMPGLPWLGPAPLGSVEKDTGSALSYKPVSPRRPWSPSKEAGSRPPLARKHSLTKNDSSPQRCSPAREPQASAPSPPGLHVDPGRGMGALPCGSPRLQLSPLTLCPLGRELAPRAHVLSKLEGTTDPGLPRYSPTRRWSPGQAESPPRSAPPGKWALAGPGSPSAGEHGPGLGLDPRVLFPPAPLPHKLLSRSPETCASPWQKAESRSPSCSPGPAHPLSSRPFSALHDFHGHILARTEENIFSHLPLHSQHLTRAPCPLIPIGGIQMVQARPGAHPTLLPGPTAAWVSGFSGGGSDLTGAREAQERGRWSPTESSSASVSPVAKVSKFTLSSELEGGDYPKERERTGGGPGRPPDWTPHGTGAPAEPTPTHSPCTPPDTLPRPPQGRRAAQSWSPRLESPRAPTNPEPSATPPLDRSSSVGCLAEASARFPARTRNLSGEPRTRQDSPKPSGSGEPRAHPHQPEDRVPPNA

SEQ ID NO: 772 - protein, 2405 aa, Homo sapiens
MDPEQSVKGTKKAEGSPRKRLTKGEAIQTSVSSSVPYPGSGTAATQESPAQELLAPQPFPGPSSVLREGSQEKTGQQQKPPKRPPIEASVHISQLPQHPLTPAFMSPGKPEHLLEGSTWQLVDPMRPGPSGSFVAPGLHPQSQLLPSHASIIPPEDLPGVPKVFVPRPSQVSLKPTEEAHKKERKPQKPGKYICQYCSRPCAKPSVLQKHIRSHTGERPYPCGPCGFSFKTKSNLYKHRKSHAHRIKAGLASGMGGEMYPHGLEMERIPGEEFEEPTEGESTDSEEETSATSGHPAELSPRPKQPLLSSGLYSSGSHSSSHERCSLSQSSTAQSLEDPPPFVEPSSEHPLSHKPEDTHTIKQKLALRLSERKKVIDEQAFLSPGSKGSTESGYFSRSESAEQQVSPPNTNAKSYAEIIFGKCGRIGQRTAMLTATSTQPLLPLSTEDKPSLVPLSVPRTQVIEHITKLITINEAVVDTSEIDSVKPRRSSLSRRSSMESPKSSLYREPLSSHSEKTKPEQSLLSLQHPPSTAPPVPLLRSHSMPSAACTISTPHHPFRGSYSFDDHITDSEALSHSSHVFTSHPRMLKRQPAIELPLGGEYSSEEPGPSSKDTASKPSDEVEPKESELTKKTKKGLKTKGVIYECNICGARYKKRDNYEAHKKYYCSELQIAKPISAGTHTSPEAEKSQIEHEPWSQMMHYKLGTTLELTPLRKRRKEKSLGDEEEPPAFESTKSQFGSPGPSDAARNLPLESTKSPAEPSKSVPSLEGPTGFQPRTPKPGSGSESGKERRTTSKEISVIQHTSSFEKSDSLEQPSGLEGEDKPLAQFPSPPPAPHGRSAHSLQPKLVRQPNIQVPEILVTEEPDRPDTEPEPPPKEPEKTEEFQWPQRSQTLAQLPAEKLPPKKKRLRLAEMAQSSGESSFESSVPLSRSPSQESNVSLSGSSRSASFERDDHGKAEAPSPSSDMRPKPLGTHMLTVPSHHPHAREMRRSASEQSPNVSHSAHMTETRSKSFDYGSLSLTGPSAPAPVAPPARVAPPERRKCFLVRQASLSRPPESELEVAPKGRQESEEPQPSSSKPSAKSSLSQISSAATSHGGPPGGKGPGQDRPPLGPTVPYTEALQVFHHPVAQTPLHEKPYLPPPVSLFSFQHLVQHEPGQSPEFFSTQAMSSLLSSPYSMPPLPPSLFQAPPLPLQPTVLHPGQLHLPQLMPHPANIPFRQPPSFLPMPYPTSSALSSGFFLPLQSQFALQLPGDVESHLPQIKTSLAPLATGSAGLSPSTEYSSDIRLPPVAPPASSSAPTSAPPLALPACPDTMVSLVVPVRVQTNMPSYGSAMYTTLSQILVTQSQGSSATVALPKFEEPPSKGTTVCGADVHEVGPGPSGLSEEQSRAFPTPYLRVPVTLPERKGTSLSSESILSLEGSSSTAGGSKRVLSPAGSLELTMETQQQKRVKEEEASKADEKLELVKPCSVVLTSTEDGKRPEKSHLGNQGQGRRELEMLSSLSSDPSDTKEIPPLPHPALSHGTAPGSEALKEYPQPSGKPHRRGLTPLSVKKEDSKEQPDLPSLAPPSSLPLSETSSRPAKSQEGTDSKKVLQFPSLHTTTNVSWCYLNYIKPNHIQHADRRSSVYAGWCISLYNPNLPGVSTKAALSLLRSKQKVSKETYTMATAPHPEAGRLVPSSSRKPRMTEVHLPSLVSPEGQKDLARVEKEEERRGEPEEDAPASQRGEPARIKIFEGGYKSNEEYVYVRGRGRGKYVCEECGIRCKKPSMLKKHIRTHTDVRPYVCKHCHFAFKTKGNLTKHMKSKAHSKKCQETGVLEELEAEEGTSDDLFQDSEGREGSEAVEEHQFSDLEDSDSDSDLDEDEDEDEEESQDELSRPSSEAPPPGPPHALRADSSPILGPQPPDAPASGTEATRGSSVSEAERLTASSCSMSSQSMPGLPWLGPAPLGSVEKDTGSALSYKPVSPRRPWSPSKEAGSRPPLARKHSLTKNDSSPQRCSPAREPQASAPSPPGLHVDPGRGMGALPCGSPRLQLSPLTLCPLGRELAPRAHVLSKLEGTTDPGLPRYSPTRRWSPGQAESPPRSAPPGKWALAGPGSPSAGEHGPGLGLDPRVLFPPAPLPHKLLSRSPETCASPWKAESRSPSCSPGPAHPLSSRPFSALHDFHGHILARTEENIFSHLPLHSQHLTRAPCPLIPIGGIQMVQARPGAHPTLLPGPTAAWVSGFSGGGSDLTGAREAQERGRWSPTESSSASVSPVAKVSKFTLSSELEGGDYPKERERTGGGPGRPPDWTPHGTGAPAEPTPTHSPCTPPDTLPRPPQGRRAAQSWSPRLESPRAPTNPEPSATPPLDRSSSVGCLAEASARFPARTRNLSGEPRTRQDSPKPSGSGEPRAHPHQPEDRVPPNA

SEQ ID NO: 773 - protein, 801 aa, Homo sapiens
MKTSPRRPLILKRRRLPLPVQNAPSETSEEEPKRSPAQQESNQAEASKEVAESNSCKFPAGIKIINHPTMPNTQVVAIPNNANIHSIITALTAKGKESGSSGPNKFILISCGGAPTQPPGLRPQTQTSYDAKRTEVTLETLGPKPAARDVNLPRPPGALCEQKRETCADGEAAGCTINNSLSNIQWLRKMSSDGLGSRSIKQEMEEKENCHLEQRQVKVEEPSRPSASWQNSVSERPPYSYMAMIQFAINSTERKRMTLKDIYTWIEDHFPYFKHIAKPGWKNSIRHNLSLHDMFVRETSANGKVSFWTIHPSANRYLTLDQVFKPLDPGSPQLPEHLESQQKRPNPELRRNMTIKTELPLGARRKMKPLLPRVSSYLVPIQFPVNQSLVLQPSVKVPLPLAASLMSSELARHSKRVRIAPKVFGEQVVFGYMSKFFSGDLRDFGTPITSLFNFIFLCLSVLLAEEGIAPLSSAGPGKEEKLLFGEGFSPLLPVQTIKEEEIQPGEEMPHLARPIKVESPPLEEWPSPAPSFKEESSHSWEDSSQSPTPRPKKSYSGLRSPTRCVSEMLVIQHRERRERSRSRRKQHLLPPCVDEPELLFSEGPSTSRWAAELPFPADSSDPASQLSYSQEVGGPFKTPIKETLPISSTPSKSVLPRTPESWRLTPPAKVGGLDFSPVQTSQGASDPLPDPLGLMDLSTTPLQSAPPLESPQRLLSSEPLDLISVPFGNSSPSDIDVPKPGSPEPQVSGLAANRSLTEGLVLDTMNDSLSKILLDISFPGLDEDPLGPDNINWSQFIPELQ

SEQ ID NO: 774 - protein, 748 aa, Homo sapiens
MKTSPRRPLILKRRRLPLPVQNAPSETSEEEPKRSPAQQESNQAEASKEVAESNSCKFPAGIKIINHPTMPNTQVVAIPNNANIHSIITALTAKGKESGSSGPNKFILISCGGAPTQPPGLRPQTQTSYDAKRTEVTLETLGPKPAARDVNLPRPPGALCEQKRETCADGEAAGCTINNSLSNIQWLRKMSSDGLGSRSIKQEMEEKENCHLEQRQVKVEEPSRPSASWQNSVSERPPYSYMAMIQFAINSTERKRMTLKDIYTWIEDHFPYFKHIAKPGWKNSIRHNLSLHDMFVRETSANGKVSFWTIHPSANRYLTLDQVFKQQKRPNPELRRNMTIKTELPLGARRKMKPLLPRVSSYLVPIQFPVNQSLVLQPSVKVPLPLAASLMSSELARHSKRVRIAPKVLLAEEGIAPLSSAGPGKEEKLLFGEGFSPLLPVQTIKEEEIQPGEEMPHLARPIKVESPPLEEWPSPAPSFKEESSHSWEDSSQSPTPRPKKSYSGLRSPTRCVSEMLVIQHRERRERSRSRRKQHLLPPCVDEPELLFSEGPSTSRWAAELPFPADSSDPASQLSYSQEVGGPFKTPIKETLPISSTPSKSVLPRTPESWRLTPPAKVGGLDFSPVQTSQGASDPLPDPLGLMDLSTTPLQSAPPLESPQRLLSSEPLDLISVPFGNSSPSDIDVPKPGSPEPQVSGLAANRSLTEGLVLDTMNDSLSKILLDISFPGLDEDPLGPDNINWSQFIPELQ

SEQ ID NO: 775 - protein, 763 aa, Homo sapiens
MKTSPRRPLILKRRRLPLPVQNAPSETSEEEPKRSPAQQESNQAEASKEVAESNSCKFPAGIKIINHPTMPNTQVVAIPNNANIHSIITALTAKGKESGSSGPNKFILISCGGAPTQPPGLRPQTQTSYDAKRTEVTLETLGPKPAARDVNLPRPPGALCEQKRETCADGEAAGCTINNSLSNIQWLRKMSSDGLGSRSIKQEMEEKENCHLEQRQVKVEEPSRPSASWQNSVSERPPYSYMAMIQFAINSTERKRMTLKDIYTWIEDHFPYFKHIAKPGWKNSIRHNLSLHDMFVRETSANGKVSFWTIHPSANRYLTLDQVFKPLDPGSPQLPEHLESQQKRPNPELRRNMTIKTELPLGARRKMKPLLPRVSSYLVPIQFPVNQSLVLQPSVKVPLPLAASLMSSELARHSKRVRIAPKVLLAEEGIAPLSSAGPGKEEKLLFGEGFSPLLPVQTIKEEEIQPGEEMPHLARPIKVESPPLEEWPSPAPSFKEESSHSWEDSSQSPTPRPKKSYSGLRSPTRCVSEMLVIQHRERRERSRSRRKQHLLPPCVDEPELLFSEGPSTSRWAAELPFPADSSDPASQLSYSQEVGGPFKTPIKETLPISSTPSKSVLPRTPESWRLTPPAKVGGLDFSPVQTSQGASDPLPDPLGLMDLSTTPLQSAPPLESPQRLLSSEPLDLISVPFGNSSPSDIDVPKPGSPEPQVSGLAANRSLTEGLVLDTMNDSLSKILLDISFPGLDEDPLGPDNINWSQFIPELQ

SEQ ID NO: 776 - protein, 206 aa, Homo sapiens
  misc_feature (1)..(1): Xaa can be any naturally occurring amino acid
XAKPGWKNSIRHNLSLHDMFVRETSANGKVSFWTIHPSANRYLTLDQVFKPLDPGSPQLPEHLESQQQKRPNPELRRNMTIKTELPLGARRKMKPLLPRVSSYLVPIQFPVNQSLVLQPSVKVPLPLAASLMSSELARHSKRVRIAPKVLLAEEGIAPLSSAGPGKEEKLLFGEGFSPLLPVQTIKEEEIQPGEEMPHLARPIKVE

SEQ ID NO: 777 - protein, 80 aa, Homo sapiens
TALTAKGKESGSSGPNKFILISCGGAPTQPPGLRPQTQTSYDAKRTEVTLETLGPKPAARDVNLPRPPGALCEQKRETCG

SEQ ID NO: 778 - protein, 748 aa, Homo sapiens
MKTSPRRPLILKRRRLPLPVQNAPSETSEEEPKRSPAQQESNQAEASKEVAESNSCKFPAGIKIINHPTMPNTQVVAIPNNANIHSIITALTAKGKESGSSGPNKFILISCGGAPTQPPGLRPQTQTSYDAKRTEVTLETLGPKPAARDVNLPRPPGALCEQKRETCDGEAAGCTINNSLSNIQWLRKMSSDGLGSRSIKQEMEEKENCHLEQRQVKVEEPSRPSASWQNSVSERPPYSYMAMIQFAINSTERKRMTLKDIYTWIEDHFPYFKHIAKPGWKNSIRHNLSLHDMFVRETSANGKVSFWTIHPSANRYLTLDQVFKQQQKRPNPELRRNMTIKTELPLGARRKMKPLLPRVSSYLVPIQFPVNQSLVLQPSVKVPLPLAASLMSSELARHSKRVRIAPKVLLAEEGIAPLSSAGPGKEEKLLFGEGFSPLLPVQTIKEEEIQPGEEMPHLARPIKVESPPLEEWPSPAPSFKEESSHSWEDSSQSPTPRPKKSYSGLRSPTRCVSEMLVIQHRERRERSRSRRKQHLLPPCVDEPELLFSEGPSTSRWAAELPFPADSSDPASQLSYSQEVGGPFKTPIKETLPISSTPSKSVLPRTPESWRLTPPAKVGGLDFSPVQTSQGASDPLPDPLGLMDLSTTPLQSAPPLESPQRLLSSEPLDLISVPFGNSSPSDIDVPKPGSPEPQVSGLAANRSLTEGLVLDTMNDSLSKILLDISFPGLDEDPLGPDNINWSQFIPELQ

SEQ ID NO: 779 - protein, 432 aa, Homo sapiens
MSELKDCPLQFHDFKSVDHLKVCPRYTAVLARSEDDGIGIEELDTLQLELETLLSSASRRLRVLEAETQILTDWQDKKGDRRFLKLGRDHELGAPPKHGKPKKQKLEGKAGHGPGPGPGRPKSKNLQPKIQEYEFTDDPIDVPRIPKNDAPNRFWASVEPYCADITSEEVRTLEELLKPPEDEAEHYKIPPLGKHYSQRWAQEDLLEEQKDGARAAAVADKKKGLMGPLTELDTKDVDALLKKSEAQHEQPEDGCPFGALTQRLLQALVEENIISPMEDSPIPDMSGKESGADGASTSPRNQNKPFSVPHTKSLESRIKEELIAQGLLESEDRPAEDSEDEVLAELRKRQAELKALSAHNRTKKHDLLRLAKEEVSRQELRQRVRMADNEVMDAFRKIMAARQKKRTPTKKEKDQAWKTLKERESILKLLDG

SEQ ID NO: 780 - protein, 432 aa, Homo sapiens; identical to SEQ ID NO: 779

SEQ ID NO: 781 - protein, 369 aa, Homo sapiens
MSELKDCPLQFHDFKSVDHLKVCPRYTAVLARSEDDGIGIEELDTLQLELETLLSSASRRLRVLEAETQILTDWQDKKGDRRFLKLGRDHELGAPPKHGKPKKQKLEGKAGHGPGPGPGRPKSKNLQPKIQEYEFTDDPIDVPRIPKNDAPNRFWASVEPYCADITSEEVRTLEELLKPPEDEAEHYKIPPLGKHYSQRWAQEDLLEEQKDGARAAAVADKKKGLMGPLTELDTKDVDALLKKSEAQHEQPEDGCPFGALTQRLLQALVEENIISPMEDSPIPDMSGKESGADGASTSPRNQNKPFSVPHTKSLESRIKEELIAQGLLESEDRPAEDSEDEVLAELRKRQAELKALSAHNRTKKHDLLR

SEQ ID NO: 782 - protein, 95 aa, Homo sapiens
MSELKDCPLQFHDFKSVDHLKVCPRYTAVLARSEDDGIGIEELDTLQLELETLLSSASRRLRVLEAETQILTDWQDKKGDRRFLKLGRDHELGAP

SEQ ID NO: 783 - protein, 99 aa, Homo sapiens
MPSDFISLLSADLDLESPKSLYSRDSLKLHPSQNFHRAGLLEESVYDLLPKELQLPPSRETSVASMSQTSGGEAGSPPPAVVAAGFASEAGSVCIKNDL

SEQ ID NO: 784 - protein, 1531 aa, Homo sapiens
MPSDFISLLSADLDLESPKSLYSRESVYDLLPKELQLPPSRETSVASMSQTSGGEAGSPPPAVVAADASSAPSSSSMGGACSSFTTSSSPTIYSTSVTDSKAMQVESCSSAVGVSNRGVSEKQLTSNTVQQHPSTPKRHTVLYISPPPEDLLDNSRMSCQDEGCGLESEQSCSMWMEDSPSNFSNMSTSSYNDNTEVPRKSRKRNPKQRPGVKRRDCEESNMDIFDADSAKAPHYVLSQLTTDNKGNSKAGNGTLENQKGTGVKKSPMLCGQYPVKSEGKELKIVVQPETQHRARYLTEGSRGSVKDRTQQGFPTVKLEGHNEPVVLQVFVGNDSGRVKPHGFYQACRVTGRNTTPCKEVDIEGTTVIEVGLDPSNNMTLAVDCVGILKLRNADVEARIGIAGSKKKSTRARLVFRVNIMRKDGSTLTLQTPSSPILCTQPAGVPEILKKSLHSCSVKGEEEVFLIGKNFLKGTKVIFQENVSDENSWKSEAEIDMELFHQNHLIVKVPPYHDQHITLPVSVGIYVVTNAGRSHDVQPFTYTPDPAAAGALNVNVKKEISSPARPCSFEEAMKAMKTTGCNLDKVNIIPNALMTPLIPSSMIKSEDVTPMEVTAEKRSSTIFKTTKSVGSTQQTLENISNIAGNGSFSSPSSSHLPSENEKQQQIQPKAYNPETLTTIQTQDISQPGTFPAVSASSQLPNSDALLQQATQFQTRETQSREILQSDGTVVNLSQLTEASQQQQQSPLQEQAQTLQQQISSNIFPSPNSVSQLQNTIQQLQAGSFTGSTASGSSGSVDLVQQVLEAQQQLSSVLFSAPDGNENVQEQLSADIFQQVSQIQSGVSPGMFSSTEPTVHTRPDNLLPGRAESVHPQSENTLSNQQQQQQQQQQVMESSAAMVMEMQQSICQAAAQIQSELFPSTASANGNLQQSPVYQQTSHMMSALSTNEDMQMQCELFSSPPAVSGNETSTTTTQQVATPGTTMFQTSSSGDGEETGTQAKQIQNSVFQTMVQMQHSGDNQPQVNLFSSTKSMMSVQNSGTQQQGNGLFQQGNEMMSLQSGNFLQQSSHSQAQLFHPQNPIADAQNLSQETQGSLFHSPNPIVHSQTSTTSSEQMQPPMFHSQSTIAVLQGSSVPQDQQSTNIFLSQSPMNNLQTNTVAQEAFFAAPNSISPLQSTSNSEQQAAFQQQAPISHIQTPMLSQEQAQPPQQGLFQPQVALGSLPPNPMPQSQQGTMFQSQHSIVAMQSNSPSQEQQQQQQQQQQQQQQQQQSILFSNQNTMATMASPKQPPPNMIFNPNQNPMANQEQQNQSIFHQQSNMAPMNQEQQPMQFQSQSTVSSLQNPGPTQSESSQTPLFHSSPQIQLVQGSPSSQEQQVTLFLSPASMSALQTSINQQDMQQSPLYSPQNNMPGIQGATSSPQPQATLFHNTAGGTMNQLQNSPGSSQQTSGMFLFGIQNNCSQLLTSGPATLPDQLMAISQPGQPQNEGQPPVTTLLSQQMPENSPLASSINTNQNIEKIDLLVSLQNQGNNLTGSF

SEQ ID NO: 785 - protein, 119 aa, Homo sapiens; identical to SEQ ID NO: 160

SEQ ID NO: 786 - protein, 1548 aa, Homo sapiens
MPSDFISLLSADLDLESPKSLYSRDSLKLHPSQNFHRAGLLEESVYDLLPKELQLPPSRETSVASMSQTSGGEAGSPPPAVVAADASSAPSSSSMGGACSSFTTSSSPTIYSTSVTDSKAMQVESCSSAVGVSNRGVSEKQLTSNTVQQHPSTPKRHTVLYISPPPEDLLDNSRMSCQDEGCGLESEQSCSMWMEDSPSNFSNMSTSSYNDNTEVPRKSRKRNPKQRPGVKRRDCEESNMDIFDADSAKAPHYVLSQLTTDNKGNSKAGNGTLENQKGTGVKKSPMLCGQYPVKSEGKELKIVVQPETQHRARYLTEGSRGSVKDRTQQGFPTVKLEGHNEPVVLQVFVGNDSGRVKPHGFYQACRVTGRNTTPCKEVDIEGTTVIEVGLDPSNNMTLAVDCVGILKLRNADVEARIGIAGSKKKSTRARLVFRVNIMRKDGSTLTLQTPSSPILCTQPAGVPEILKKSLHSCSVKGEEEVFLIGKNFLKGTKVIFQENVSDENSWKSEAEIDMELFHQNHLIVKVPPYHDQHITLPVSVGIYVVTNAGRSHDVQPFTYTPDPAAGALNVNVKKEISSPARPCSFEEAMKAMKTTGCNLDKVNIIPNALMTPLIPSSMIKSEDVTPMEVTAEKRSSTIFKTTKSVGSTQQTLENISNIAGNGSFSSPSSSHLPSENEKQQQIQPKAYNPETLTTIQTQDISQPGTFPAVSASSQLPNSDALLQQATQFQTRETQSREILQSDGTVVNLSQLTEASQQQQQSPLQEQAQTLQQQISSNIFPSPNSVSQLQNTIQQLQAGSFTGSTASGSSGSVDLVQQVLEAQQQLSSVLFSAPDGNENVQEQLSADIFQQVSQIQSGVSPGMFSSTEPTVHTRPDNLLPGRAESVHPQSENTLSNQQQQQQQQQQVMESSAAMVMEMQQSICQAAAQIQSELFPSTASANGNLQQSPVYQQTSHMMSALSTNEDMQMQCELFSSPPAVSGNETSTTTTQQVATPGTTMFQTSSSGDGEETGTQAKQIQNSVFQTMVQMQHSGDNQPQVNLFSSTKSMMSVQNSGTQQQGNGLFQQGNEMMSLQSGNFLQQSSHSQAQLFHPQNPIADAQNLSQETQGSLFHSPNPIVHSQTSTTSSEQMQPPMFHSQSTIAVLQGSSVPQDQQSTNIFLSQSPMNNLQTNTVAQEAFFAAPNSISPLQSTSNSEQQAAFQQQAPISHIQTPMLSQEQAQPPQQGLFQPQVALGSLPPNPMPQSQQGTMFQSQHSIVAMQSNSPSQEQQQQQQQQQQQQQQQQQSILFSNQNTMATMASPKQPPPNMIFNPNQNPMANQEQQNQSIFHQQSNMAPMNQEQQPMQFQSQSTVSSLQNPGPTQSESSQTPLFHSSPQIQLVQGSPSSQEQQVTLFLSPASMSALQTSINQQDMQQSPLYSPQNNMPGIQGATSSPQPQATLFHNTAGGTMNQLQNSPGSSQQTSGMFLFGIQNNCSQLLTSGPATLPDQLMAISQPGQPQNEGQPPVTTLLSQQMPENSPLASSINTNQNIEKIDLLVSLQNQGNNLTGSF

SEQ ID NO: 787 - protein, 1549 aa, Homo sapiens
MPSDFISLLSADLDLESPKSLYSRDSLKLHPSQNFHRAGLLEESVYDLLPKELQLPPSRETSVASMSQTSGGEAGSPPPAVVAADASSAPSSSSMGGACSSFTTSSSPTIYSTSVTDSKAMQVESCSSAVGVSNRGVSEKQLTSNTVQQHPSTPKRHTVLYISPPPEDLLDNSRMSCQDEGCGLESEQSCSMWMEDSPSNFSNMSTSSYNDNTEVPRKSRKRNPKQRPGVKRRDCEESNMDIFDADSAKAPHYVLSQLTTDNKGNSKAGNGTLENQKGTGVKKSPMLCGQYPVKSEGKELKIVVQPETQHRARYLTEGSRGSVKDRTQQGFPTVKLEGHNEPVVLQVFVGNDSGRVKPHGFYQACRVTGRNTTPCKEVDIEGTTVIEVGLDPSNNMTLAVDCVGILKLRNADVEARIGIAGSKKKSTRARLVFRVNIMRKDGSTLTLQTPSSPILCTQPAGVPEILKKSLHSCSVKGEEEVFLIGKNFLKGTKVIFQENVSDENSWKSEAEIDMELFHQNHLIVKVPPYHDQHITLPVSVGIYVVTNAGRSHDVQPFTYTPDPAAAGALNVNVKKEISSPARPCSFEEAMKAMKTTGCNLDKVNIIPNALMTPLIPSSMIKSEDVTPMEVTAEKRSSTIFKTTKSVGSTQQTLENISNIAGNGSFSSPSSSHLPSENEKQQQIQPKAYNPETLTTIQTQDISQPGTFPAVSASSQLPNSDALLQQATQFQTRETQSREILQSDGTVVNLSQLTEASQQQQQSPLQEQAQTLQQQISSNIFPSPNSVSQLQNTIQQLQAGSFTGSTASGSSGSVDLVQQVLEAQQQLSSVLFSAPDGNENVQEQLSADIFQQVSQIQSGVSPGMFSSTEPTVHTRPDNLLPGRAESVHPQSENTLSNQQQQQQQQQQVMESSAAMVMEMQQSICQAAAQIQSELFPSTASANGNLQQSPVYQQTSHMMSALSTNEDMQMQCELFSSPPAVSGNETSTTTTQQVATPGTTMFQTSSSGDGEETGTQAKQIQNSVFQTMVQMQHSGDNQPQVNLFSSTKSMMSVQNSGTQQQGNGLFQQGNEMMSLQSGNFLQQSSHSQAQLFHPQNPIADAQNLSQETQGSLFHSPNPIVHSQTSTTSSEQMQPPMFHSQSTIAVLQGSSVPQDQQSTNIFLSQSPMNNLQTNTVAQEAFFAAPNSISPLQSTSNSEQQAAFQQQAPISHIQTPMLSQEQAQPPQQGLFQPQVALGSLPPNPMPQSQQGTMFQSQHSIVAMQSNSPSQEQQQQQQQQQQQQQQQQQSILFSNQNTMATMASPKQPPPNMIFNPNQNPMANQEQQNQSIFHQQSNMAPMNQEQQPMQFQSQSTVSSLQNPGPTQSESSQTPLFHSSPQIQLVQGSPSSQEQQVTLFLSPASMSALQTSINQQDMQQSPLYSPQNNMPGIQGATSSPQPQATLFHNTAGGTMNQLQNSPGSSQQTSGMFLFGIQNNCSQLLTSGPATLPDQLMAISQPGQPQNEGQPPVTTLLSQQMPENSPLASSINTNQNIEKIDLLVSLQNQGNNLTGSF

SEQ ID NO: 788 - protein, 1455 aa, Homo sapiens; identical to SEQ ID NO: 742

SEQ ID NO: 789 - protein, 1455 aa, Homo sapiens; identical to SEQ ID NO: 742

SEQ ID NO: 790 - protein, 141 aa, Homo sapiens
AMQVESCSSAVGNNMPGIQGATSSPQPQATLFHNTAGGTMNQLQNSPGSSQQTSGMFLFGIQNNCSQLLTSGPATLPDQLMAISQPGQPQNEGQPPVTTLLSQQMPENSPLASSINTNQNIEKIDLLVSLQNQGNNLTGSF

SEQ ID NO: 791 - protein, 143 aa, Homo sapiens
  misc_feature (1)..(1): Xaa can be any naturally occurring amino acid
XTLENQKGTGVKKSPMLCGQYPVKSEGKELKIVVQPETQHRARYLTEGSRGSVKDRTQQGFPTVKLEGHNEPVVLQVFVGNDSGRVKPHGFYQACRVTGRNTTPCKEVDIEGTTVIEVGLDPSNNMTLASASRSARNLKEKLA

1.-26. (canceled)

27. A molecule able to modulate the expression and/or function of at least one marker that is selectively deregulated in tumor-infiltrating regulatory T cells, characterized in that:
i) the marker is selected from the group consisting of: LAYN, MAGEH1, CCR8 and other proteins with upregulated expression in tumor-infiltrating Treg cells, including BATF, CD30, IL-1RT, IL-21R, PDL-1, PDL-2, LY75, CD177, SIRPG and CD7;
ii) the molecule targets a solid tumour selected from the group consisting of: non-small cell lung cancer, colorectal cancer, breast cancer, and gastric cancer or a metastatic cancer derived therefrom; and
iii) the molecule is for use in the prevention and/or treatment of said tumor.

28. A molecule as claimed in claim 27, wherein the metastatic cancer is a bone, brain, or liver metastasis.

29. A molecule as claimed in claim 27 for use in the treatment of non-small cell lung cancer.

30. A molecule as claimed in claim 27 for use in the treatment of colorectal cancer.

31. A molecule as claimed in claim 27, wherein the molecule is:
a) an antibody or a fragment thereof;
b) a polypeptide;
c) a small molecule;
d) a polynucleotide coding for said antibody or fragment thereof or said polypeptide;
e) a polynucleotide, which is an antisense construct, antisense oligonucleotide, RNA interference construct or siRNA;
f) a vector comprising or expressing the polynucleotide as defined in d) or e); or
g) a host cell genetically engineered expressing said antibody or fragment thereof or polypeptide as defined in a) or b) or comprising the polynucleotide as defined in d) or e).

32. A molecule as claimed in claim 31, wherein the molecule is:
a) an antibody or fragment thereof,
d) a polynucleotide coding for said antibody or a fragment thereof; or
g) a host cell genetically engineered expressing said antibody or fragment thereof as defined in a) or comprising the polynucleotide as defined in d).

33. A molecule as claimed in claim 27, wherein the marker has a sequence as defined by ENSEMBL_release 87 reference:
ENSG00000204381 (LAYN);
ENSG00000179934 (CCR8); or
ENSG00000187210 (MAGEH1).

34. A molecule as claimed in claim 33, wherein the marker has one of a sequence LAYN (SEQ ID NOs:1-9), CCR8 (SEQ ID NOs:10-11) or MAGEH1 (SEQ ID NOs: 708 or 709).

35. A molecule as claimed in claim 27, which is iii) for use in depleting tumor-infiltrating regulatory T cells.

36. A molecule as claimed in claim 27, which is iii) for use in enhancing tumor immunity.

37. A pharmaceutical composition comprising a molecule as claimed in claim 27 and at least one pharmaceutically acceptable carrier.

38. A pharmaceutical composition according to claim 37, wherein the composition further comprises a further anti-tumoral agent.

39. An in vitro screening, monitoring, diagnostic or prognostic method for assessing a solid tumor selected from the group consisting of: non-small cell lung cancer, colorectal cancer, breast cancer, gastric cancer, or a metastasis derived therefrom, in a subject, the method comprising the steps of:
a) obtaining an isolated biological sample from the subject;
b) detecting in the isolated biological sample at least one marker from the group consisting of: LAYN, MAGEH1 and CCR8;
c) comparing said marker with a control; and
d) based on the comparison determining a diagnosis or prognosis.

40. A method for identifying a molecule acting as an anti-tumoral molecule, comprising the steps of:
a) assaying candidate molecules for their binding specificity to at least one marker from the group consisting of: LAYN, MAGEH1 and CCR8;
b) selecting molecules having a specific binding specificity to the at least one marker; and
c) testing selected molecules for their capacity to inhibit proliferation and/or induce an apoptotic response in a cell system against a non-small cell lung cancer, colorectal cancer, breast cancer, gastric cancer or a metastatic cancer derived therefrom.

41. A method as claimed in claim 40 wherein step c) comprises testing for selectively depleting tumor-infiltrating regulatory T cells by inducing antibody-dependent cell-mediated cytotoxicity (ADCC).
